(19) United States
(12) Patent Application Publication
(10) Pub. No.: US 2023/0227790 A1
(43) Pub. Date: Jul. 20, 2023

(54) METHOD OF ASSEMBLYING TWO-COMPONENT VIRUS-LIKE PARTICLE

(71) Applicants: Scot R. SHEPARD, Chapel Hill, NC (US); Hans R. LIEN, Bozeman, MT (US); Ross M. TAYLOR, Seattle, WA (US); Icosavax, Inc., Seattle, WA (US)

(72) Inventors: Scot R. SHEPARD, Seattle, WA (US); Hans R. LIEN, Bozeman, MT (US); Ross M. TAYLOR, Seattle, WA (US); Charles RICHARDSON, Seattle, WA (US)

(21) Appl. No.: 18/000,566

(22) PCT Filed: Jun. 9, 2021
(86) PCT No.: PCT/US2021/036689

§ 371 Date: Dec. 2, 2022

Related U.S. Application Data
(60) Provisional application No. 63/036,505, filed on Jun. 9, 2020.

(51) Int. Cl. C12N 7/00; A61K 39/12; C07K 14/16

(52) U.S. Cl. CPC C12N 7/00; A61K 39/12; C07K 14/16; A61K 2039/5258

(57) ABSTRACT

Disclosed are methods of a method of making a nanostructure, comprising adding a component A (compA) protein to a solution comprising a component B (compB) protein under conditions that minimize shear stress, thereby forming a compA:compB complex. Further disclosed are methods of making a nanostructure, comprising (i) providing a first inlet fluid stream comprising a first protein and a second inlet fluid stream comprising a second protein, and (ii) contacting the first inlet fluid stream and the second inlet fluid stream to form an outlet stream, wherein mixing of the first protein and the second protein occurs in the outlet stream, thereby forming a protein complex comprises the first protein and the second protein. A microfluidic mixer may be used. The methods may further comprise purifying the compA:compB complex from excess compA, excess compB, and/or other impurities by filtering the solution with a 1,000 kDa membrane or an equivalent thereof.

### CROSS REFERENCE TO RELATED APPLICATION

[0001] This application claims priority to U.S. Provisional Application No. 63/036,505, filed Jun. 9, 2020, the entire contents of which are hereby incorporated by reference.

### STATEMENT REGARDING SEQUENCE LISTING

[0002] The Sequence Listing associated with this application is provided in text format in lieu of a paper copy, and is hereby incorporated by reference into the specification. The name of the text file containing the Sequence Listing is ICVX_009_01WO_ST25.txt. The text file is 838 KB, created on Jun. 9, 2021, and is being submitted electronically via EFS-Web.

### FIELD OF INVENTION

[0003] The present disclosure relates generally to self-assembling protein nanostructures, in particular methods of making nanostructures, including nanostructure-based vaccines.

### BACKGROUND

[0004] Protein-based Virus-Like Particles (pbVLPs), also called nanostructures, provide a useful platform to present proteins or other macromolecules symmetrically. They can be distinguished from conventional VLPs made from viral capsid proteins (e.g., from a non-enveloped virus) or lipid-embedded proteins (e.g., extracted from an enveloped virus or made using recombinant membrane proteins mixed with lipids). The later do not generally have defined symmetry. The former are generally limited in their ability to display proteins, due to challenges in attaching proteins to viral capsids.

[0005] One application for VLPs generally and for pbVLPs in particular is as vaccines. Studies have demonstrated experimentally that antigens displayed on pbVLPs elicit stronger antibody responses than conventional subunit vaccines and than non-symmetric VLPs.

[0006] Bale et al., Science 353:389-394 (2016) discloses various two-component icosahedral pbVLPs, including a set of pbVLPs made from protein components designated component A (compA) and component B (compB).

[0007] There remains a need in the art for methods of expressing, purifying, and assembling protein-based Virus-Like Particles. The present disclosure fulfills this need.

### SUMMARY OF THE INVENTION

[0008] The present invention relates generally to methods to assemble and purify pbVLP.

[0009] Provided herein is a method of making a nanostructure, comprising adding a component A (compA) protein to a solution comprising a component B (compB) protein under conditions that minimize shear stress, thereby forming a compA:compB complex. In some embodiments, the compA:compB complex is a complex having icosahedral symmetry. In some embodiments, the compA:compB complex is a pbVLP.

[0010] In some embodiments, the disclosure provides a method of making a nanostructure, comprising adding a fusion protein to a solution comprising a component B (compB) protein under conditions that minimize shear stress, wherein the fusion protein comprises a compA protein linked to an antigenic protein, thereby forming a compA:compB complex.

[0011] In some embodiments, the conditions that minimize shear stress comprise adding the compA protein to the compB protein under the surface of the solution.

[0012] In some embodiments, the conditions that minimize shear stress comprise mixing the solution without mechanical mixing.

[0013] In some embodiments, the conditions that minimize shear stress comprise mixing the solution without a stir bar.

[0014] In some embodiments, the conditions that minimize shear stress comprise mixing the solution without an impeller.

[0015] In some embodiments, the conditions that minimize shear stress comprise mixing the solution using an orbital agitation.

[0016] In some embodiments, the conditions that minimize shear stress comprise mixing the solution using a microfluidic mixer. In some embodiments, the microfluidic mixer is a Nanoassembler® Ignite™ cartridge or any equivalent thereof.

[0017] In some embodiments, the method comprising adding the compA protein in excess to the compB protein. In some embodiments, the method comprises adding the compA protein to the compB protein, wherein the molar concentration of the compA protein and the molar concentration of the compB protein are substantially equivalent.

[0018] In some embodiments, the method provides for mixing of compA and compB without substantial precipitation. In some embodiments, the method provides for mixing of compA and compB without substantial precipitation relative to mechanical mixing of a solution of compA and compB.

[0019] In some embodiments, the method provides formation of the compA:compB complex in an amount that is at least about 40% of total protein, e.g., as measured by size exclusion chromatography. In some embodiments, the method provides formation of the compA:compB complex in an amount that about 40%, about 50%, about 60%, about 70%, about 80%, about 85%, about 90%, or about 95% of total protein, e.g., as measured by size exclusion chromatography.

[0020] In some embodiments, the method further comprises purifying the compA:compB complex from excess compA, excess compB, and/or other impurities by filtering with the solution with a 1,000 kDa membrane or an equivalent thereof. In some embodiments, the method further comprises purifying the compA:compB complex from excess compA, excess compB, and/or other impurities by filtering with the solution with a hydrophilic membrane having a pore size of about 300 kDa-3,000 kDa. In some embodiments, the pore size is about 800 kDa, about 900 kDa, about 1000 kDa, about 1100 kDa, about 1200 kDa, about 1300 kDa, about 1400 kDa, or about 1500 kDa. In some embodiments, the hydrophilic membrane comprises a material selected from PVD cellulose, composite regenerated cellulose (CRC), polytetrafluoroethylene (PTFE), polyvinylidene fluoride (PVDF), nylon, and polyethersulfone.

[0021] In some embodiments, the 1,000 kDa membrane is a composite regenerated cellulose (CRC) membrane.

[0022] In some embodiments, the 1,000 kDa membrane is Ultracel® 1000 kDa Membrane or an equivalent thereof.

[0023] In some embodiments, the filtering comprises tangential flow filtration (TFF). In some embodiments, the filtering provides the compA:compB complex with purity of about 80% or higher as measured by percent weight of total protein. In some embodiments, the filtering provides the compA:compB complex with purity of about 80%, about 85%, about 90%, about 95%, about 96%, about 97%, about 98%, or about 99% as measured by percent weight of total protein. In some embodiments, the filtering provides the compA:compB complex with purity of about 90-99% as measured by percent weight of total protein.

[0024] In some embodiments, the method does not comprise purifying the solution with a hydrophobic membrane (e.g., Pellicon Biomax 1000 kDa), a Butyl Convective Interaction Media (CIM) column, a Captocore700 column, or an equivalent thereto.

[0025] In some embodiments, the method is a continuous or semi-continuous process.

[0026] In some embodiments, the compA protein is continuously produced prior to the adding step.

[0027] In some embodiments, the compB protein is provided as one or more frozen batches.

[0028] In some aspects, the disclosure provides a method of making a nanostructure, comprising (i) providing a first inlet fluid stream comprising a first protein and a second inlet fluid stream comprising a second protein, and (ii) contacting the first inlet fluid stream and the second inlet fluid stream to form an outlet stream, wherein mixing of the first protein and the second protein occurs in the outlet stream, thereby forming a protein complex comprising the first protein and the second protein. In some embodiments, the method comprises (i) providing a first inlet fluid stream comprising a first protein and a second inlet fluid stream comprising a second protein, wherein the first protein comprises a compA protein, and wherein the second protein comprises a compB protein; and (ii) contacting the first inlet fluid stream and the second inlet fluid stream to form an outlet stream, wherein mixing of the first protein and the second protein occurs in the outlet stream, thereby forming a protein based VLP (pbVLP) complex comprising the first protein and the second protein.

[0029] In some embodiments, the first inlet fluid stream and the second inlet fluid stream are joined in a three-way configuration to form the outlet stream, optionally wherein the three-way configuration is a T-shaped or Y-shaped configuration. In some embodiments, the first inlet fluid stream and the second inlet fluid stream are joined to form the outlet stream, wherein the outlet stream passes through a static mixer (e.g., a pipe mixer), wherein mixing of the first protein (e.g., compA) and the second protein (e.g., compB) occurs as the outlet stream passes through the static mixer, thereby forming a complex (e.g., pbVLP complex) comprising the first protein and the second protein.

[0030] In some embodiments, the first inlet fluid stream and the second inlet fluid stream are joined to form the outlet stream using a microfluidic mixer. In some embodiments, the microfluidic mixer is a Nanoassembler® Ignite™ cartridge or any equivalent thereof. In some embodiments, the microfluidic mixer comprises one or more passive mixing elements to facilitate mixing of the first protein and the second protein. In some embodiments, the outlet stream comprises a molar concentration of the first protein (e.g., compA) that exceeds the molar concentration of the second protein (e.g., compB). In some embodiments, the outlet stream comprises a molar concentration of the first protein (e.g., compA) that is substantially equivalent to the molar concentration of the second protein (e.g., compB).

[0031] In some embodiments, the mixing of the first protein (e.g., compA) and the second protein (e.g., compB) occurs without substantial precipitation of the first protein, the second protein, the complex, or a combination thereof.

[0032] In some embodiments, the complex is formed in an amount that is at least about 40% of total protein, e.g., as measured by size exclusion chromatography. In some embodiments, the method provides formation of the compA:compB complex in an amount that about 40%, about 50%, about 60%, about 70%, about 80%, about 85%, about 90%, or about 95% of total protein, e.g., as measured by size exclusion chromatography.

[0033] In some embodiments, the method further comprises purifying the complex from excess second protein, and/or other impurities by filtering the solution with a 1,000 kDa membrane or an equivalent thereof. In some embodiments, the method further comprises purifying the compA:compB complex from excess compA, excess compB, and/or other impurities by filtering with the solution with a hydrophilic membrane having a pore size of about 300 kDa-3,000 kDa. In some embodiments, the pore size is about 800 kDa, about 900 kDa, about 1000 kDa, about 1100 kDa, about 1200 kDa, about 1300 kDa, about 1400 kDa, or about 1500 kDa. In some embodiments, the hydrophilic membrane comprises a material selected from PVD cellulose, composite regenerated cellulose (CRC), polytetrafluoroethylene (PTFE), polyvinylidene fluoride (PVDF), nylon, and polyethersulfone.

[0034] In some embodiments, the 1,000 kDa membrane is a composite regenerated cellulose (CRC) membrane.

[0035] In some embodiments, the 1,000 kDa membrane is Ultracel® 1000 kDa Membrane or an equivalent thereof.

[0036] In some embodiments, the filtering comprises tangential flow filtration (TFF). In some embodiments, the filtering provides the compA:compB complex with purity of about 80% or higher as measured by percent weight of total protein. In some embodiments, the filtering provides the compA:compB complex with purity of about 80%, about 85%, about 90%, about 95%, about 96%, about 97%, about 98%, or about 99% as measured by percent weight of total protein. In some embodiments, the filtering provides the compA:compB complex with purity of about 90-99% as measured by percent weight of total protein.

[0037] In some embodiments, the method does not comprise purifying the solution with a hydrophobic membrane (e.g., Pellicon Biomax 1000 kDa), a Butyl Convective Interaction Media (CIM) column, a Captocore700 column, or an equivalent thereto.

[0038] In some embodiments, the method is a continuous or semi-continuous process.

[0039] In some embodiments, the first protein is continuously produced prior to the adding step.

[0040] In some embodiments, the second protein is provided as one or more frozen batches.

[0041] In some embodiments, the first component is a component A (compA) described herein and/or the first component is a component B (compB) described herein. In some embodiments, the compA comprises a polypeptide sequence that has at least 90%, at least 95%, at least 99%, or 100% identity to any one of SEQ IN NOs: 1, 3, 5, 7, 9, 11, 13, 15, 17, 19, 21, 23, 25, 26, 29-31, 35, 37, 39, 41, 43, 45, 47, 49, 51, 53, 55, 57, and 59. In some embodiments, the compB comprises a polypeptide sequence that has at least 90%, at least 95%, at least 99%, or 100% identity to any one of SEQ IN NOs: 2, 4, 6, 8, 10, 12, 14, 16, 18, 20, 22, 24, 27, 28, 32-34, 36, 38, 40, 42, 44, 46, 48, 50, 52, 54, 56, and 58. In some embodiments, the compA and the compB each comprise a polypeptide sequence that has at least 90%, at least 95%, at least 99%, or 100% identity to any one of (i) SEQ ID NO:1 and SEQ ID NO:2 respectively; (ii) SEQ ID NO:3 and SEQ ID NO:4 respectively; (iii) SEQ ID NO:3 and SEQ ID NO:24 respectively; (iv) SEQ ID NO:23 and SEQ ID NO:4 respectively; (v) SEQ ID NO:35 and SEQ ID NO:36 respectively; (vi) SEQ ID NO:5 and SEQ ID NO:6 respectively; (vii) SEQ ID NO:5 and SEQ ID NO:27 respectively; (viii) SEQ ID NO:5 and SEQ ID NO:28 respectively; (ix) SEQ ID NO:25 and SEQ ID NO:6 respectively; (x) SEQ ID NO:25 and SEQ ID NO:27 respectively; (xi) SEQ ID NO:25 and SEQ ID NO:28 respectively; (xii) SEQ ID NO:26 and SEQ ID NO:6 respectively; (xiii) SEQ ID NO:26 and SEQ ID NO:27 respectively; (xiv) SEQ ID NO:26 and SEQ ID NO:28 respectively; (xv) SEQ ID NO:37 and SEQ ID NO:38 respectively; (xvi) SEQ ID NO:7 and SEQ ID NO:8 respectively; (xvii) SEQ ID NO:7 and SEQ ID NO:32 respectively; (xviii) SEQ ID NO:7 and SEQ ID NO:33 respectively; (xix) SEQ ID NO:7 and SEQ ID NO:34 respectively; (xx) SEQ ID NO:29 and SEQ ID NO:8 respectively; (xxi) SEQ ID NO:29 and SEQ ID NO:32 respectively; (xxii) SEQ ID NO:29 and SEQ ID NO:33 respectively; (xxiii) SEQ ID NO:29 and SEQ ID NO:34 respectively; (xxiv) SEQ ID NO:30 and SEQ ID NO:8 respectively; (xxv) SEQ ID NO:30 and SEQ ID NO:32 respectively; (xxvi) SEQ ID NO:30 and SEQ ID NO:33 respectively; (xxvii) SEQ ID NO:30 and SEQ ID NO:34 respectively; (xxviii) SEQ ID NO:31 and SEQ ID NO:8 respectively; (xxix) SEQ ID NO:31 and SEQ ID NO:32 respectively; (xxx) SEQ ID NO:31 and SEQ ID NO:33 respectively; (xxxi) SEQ ID NO:31 and SEQ ID NO:34 respectively; (xxxii) SEQ ID NO:39 and SEQ ID NO:40 respectively; (xxxiii) SEQ ID NO:9 and SEQ ID NO:10 respectively; (xxxiv) SEQ ID NO:11 and SEQ ID NO:12 respectively; (xxxv) SEQ ID NO:13 and SEQ ID NO:14 respectively; (xxxvi) SEQ ID NO:15 and SEQ ID NO:16 respectively; (xxxvii) SEQ ID NO:19 and SEQ ID NO:20 respectively; (xxxviii) SEQ ID NO:21 and SEQ ID NO:22 respectively; (xxxviv) SEQ ID NO:23 and SEQ ID NO:24 respectively; (xl) SEQ ID NO:41 and SEQ ID NO:42 respectively; (xli) SEQ ID NO:43 and SEQ ID NO:44 respectively; (xlii) SEQ ID NO:45 and SEQ ID NO:46 respectively; (xliii) SEQ ID NO:47 and SEQ ID NO:48 respectively; (xliv) SEQ ID NO:49 and SEQ ID NO:50 respectively; (xlv) SEQ ID NO:51 and SEQ ID NO:44 respectively; (xlvi) SEQ ID NO:53 and SEQ ID NO:52 respectively; (xlvii) SEQ ID NO:55 and SEQ ID NO:54 respectively; (xlviii) SEQ ID NO:57 and SEQ ID NO:56 respectively; and (xlvix) SEQ ID NO:59 and SEQ ID NO:58 respectively.

[0042] In some embodiments, a fusion protein comprises the compA protein, wherein the compA protein is linked to an antigenic protein. In some embodiments, the fusion protein comprises a compA protein linked to an antigenic protein by a linker.

[0043] In some embodiments, the antigenic protein is selected from HIV Env, RSV F, EBV gp350, CMV gB, CMV UL128, CMV UL130, CMV UL131A, CMV gH, CMV gL, Lyme OspA, Pertussis toxin, Dengue E, SARS S, MERS S, Zaire ebolavirus GP, Sudan ebolavirus GP, Marburg virus GP, Hanta virus Gn, Hanta virus Gc, HepB surface antigen, Measles H, Zika envelope domain III, Malaria CSP, Malaria Pfs25, Nipah virus F, Nipah virus G, Rotavirus VP4, Rotavirus VP8*, hMPV F, hMPV G, PV F, PV HN, MenB fHbp, MenB NadA, coronavirus S protein, coronavirus RBD, and MenB NHBA. In some embodiments, the antigenic protein comprises a paramyxovirus and/or penumovirus F protein or an antigenic fragment thereof. In some embodiments, the antigenic protein comprises a respiratory syncytial virus (RSV) F protein or antigenic fragment thereof. In some embodiments, the antigenic protein comprises human metapneumovirus (hMPV) F protein or an antigenic fragment thereof. In some embodiments, the antigenic protein comprises an amino acid sequence having at least about 80%, about 85%, about 90%, about 91%, about 92%, about 93%, about 94%, about 95%, about 96%, about 97%, about 98%, about 99%, or about 100% identity to an amino acid sequence selected from selected from SEQ ID NOs: 64-136 and 206-209. In some embodiments, the antigenic protein comprises a polypeptide selected from SEQ ID NOs: 64-136 and 206-209.

[0044] In some embodiments, the fusion protein comprises a peptide linker positioned between the compA protein and the antigenic protein. In some embodiments, the peptide linker is a Gly-Ser linker. In some embodiments, the Gly-Ser linker comprises an amino acid sequence selected from SEQ ID NOs: 213-215. In some embodiments, the Gly-Ser linker consists of an amino acid sequence selected from SEQ ID NOs: 213-215.

[0045] In some embodiments, the fusion protein comprises an amino acid sequence having at least about 80%, about 85%, about 90%, about 91%, about 92%, about 93%, about 94%, about 95%, about 96%, about 97%, about 98%, about 99%, or about 100% identity to an amino acid sequence selected from SEQ ID NOs: 61 and 167-193. In some embodiments, the fusion protein comprises an amino acid sequence having at least about 80%, about 85%, about 90%, about 91%, about 92%, about 93%, about 94%, about 95%, about 96%, about 97%, about 98%, about 99%, or about 100% identity to an amino acid sequence selected from SEQ ID NOs: 60, 137-166, and 194-199. In some embodiments, the fusion protein comprises an amino acid sequence having at least about 80%, about 85%, about 90%, about 91%, about 92%, about 93%, about 94%, about 95%, about 96%, about 97%, about 98%, about 99%, or about 100% identity to an amino acid sequence selected from SEQ ID NOs: 200-205.

[0046] In some embodiments, the disclosure provides a method of making a nanostructure, comprising adding a fusion protein to a solution comprising a component B (compB) protein under conditions that minimize shear stress, wherein the fusion protein comprises a compA protein linked to an antigenic protein, and wherein the fusion protein comprises an amino acid sequence having at least about 80%, about 85%, about 90%, about 91%, about 92%, about 93%, about 94%, about 95%, about 96%, about 97%, about 98%, about 99%, or about 100% identity to a polypeptide selected from SEQ ID NOs: 137-205, thereby forming a compA:compB complex.

[0047] In some embodiments, the method provides a complex having icosahedral symmetry.

[0048] In some aspects, the disclosure provides a complex produced by a method described herein.

[0049] In some aspects, the disclosure provides a pharmaceutical composition comprising a complex produced by a method described herein, and a pharmaceutically acceptable diluent.

[0050] In some aspects, the disclosure provides a vaccine comprising a complex produced by a method described herein.

[0051] In some aspects, the disclosure provides a method of treating or preventing a disease or disorder in a subject in need thereof, comprising administering an effective amount of a complex described herein, a pharmaceutical composition described herein, or a vaccine described herein to the subject. In some embodiments, the disease or disorder is a viral infection.

[0052] In some aspects, the disclosure provides a method of generating an immune response in a subject in need thereof, comprising administering an effective amount of a complex described herein, a pharmaceutical composition described herein, or a vaccine described herein to the subject.

[0053] In some aspects, the disclosure provides a kit comprising a complex described herein, a pharmaceutical composition described herein, or a vaccine described herein.

[0054] In some aspects, the disclosure provides a complex described herein, a pharmaceutical composition described herein, or a vaccine described herein for use as a medicament. In some embodiments, the disclosure provides a complex described herein, a pharmaceutical composition described herein, or a vaccine described herein, for use in treating or preventing a disease or disorder in a subject in need thereof.

[0055] Further aspects and embodiments of the invention will be evident from the detailed description that follows.

### BRIEF DESCRIPTION OF THE DRAWINGS

[0056] FIG. 1A shows an illustrative embodiment of a protein-based virus-like particle (pbVLP) according to the present disclosure. The pbVLP is formed from (i) an antigen fused to a component A (compA) protein described herein that forms a trimer; and (ii) a component B (compB) protein described herein that forms a pentamer. The assembly of compA and compB proteins results in pbVLP formation.

[0057] FIG. 1B shows further illustrative embodiments of VLPs and VLP components (with G protein not shown).

[0058] FIG. 2 shows a nearest-neighbor joining tree of compA and compB proteins.

[0059] FIG. 3A shows the configuration of needle containing compA and tube containing compB used for dropwise addition. Mechanical mixing was performed with a stir bar.

[0060] FIG. 3B shows turbid solutions generated by dropwise addition. The arrow indicates presence of protein precipitate in the mixture.

[0061] FIG. 4 shows an HPLC analysis of assembled pbVLP. The pbVLP were prepared by addition of a solution of compA under a solution of compB using a pipette and mixing using an orbital shaker. Analysis by size-exclusion chromatography (SEC) showed presence of assembled pbVLP with a small peak due to high molecular weight (HMW) aggregate, presence of unassembled CompA protein, and impurities.

[0062] FIGS. 5A-5D show HPLC analysis of assembled pbVLP before or after purification by tangential flow filtration (TFF). FIG. 5A shows SEC-HPLC analysis of a crude pbVLP mixture prior to purification. FIGS. 5B-5D shows SEC-HPLC analysis of pbVLP following TFF.

[0063] FIG. 6 shows chromatographic purification with Captocore700. The SEC-HPLC profile of the VLP population changed significantly

[0064] FIG. 7 shows SEC-HPLC analysis of assembled pbVLP following chromatographic purification where both the Pellicon Biomax 1000 kDa membrane and Captocore were used in sequence. “Load TFF” represents the pbVLP mixture prior to filtration, “TFF Ultracel 1000 kDa” represents the pbVLP mixture following TFF, and “Captocore flowthrough” represents the pbVLP mixture following TFF then Captocore. The experiment showed that membrane and Captocore purification were redundant. Captocore impacted the SEC-HPLC profile (HMW peak 13.6% of VLP following filtration and 20.4% of VLP following Captocore). The bottom panel provides an overlay of the peaks.

[0065] FIG. 8A shows SEC-HPLC analysis for pbVLP assembled following addition of a trimer of CompA fused to human MPV antigen to a CompB pentamer with mixing performed using a pipette or an Ignite microfluidic mixing system. Shown is analysis of unassembled CompA-hMPV trimer (R1), CompA-hMPV/CompB mixed by pipette (R2), or CompA-hMPV/CompB mixed by the Ignite microfluidic mixing system using a flow rate of 2 mL/min or 10 mL/min (R3 and R4 respectively).

[0066] FIG. 8B shows SEC-HPLC analysis of pbVLP assembled following addition of a trimer of CompA fused to human RSV antigen to a CompB pentamer with mixing performed using a pipette or an Ignite microfluidic mixing system. Shown is analysis of unassembled CompA-RSV trimer (R9), CompA-RSV/CompB mixed by pipette (R10), or CompA-RSV/CompB mixed by the Ignite microfluidic mixing system using a flow rate of 2 mL/min or 10 mL/min (R11 and R12 respectively).

[0067] FIGS. 9A-9B show SEC-HPLC analysis of pbVLP assembled following addition of a trimer of CompA fused to human RSV antigen (FIG. 9A) or human MPV antigen (FIG. 9B) to a CompB pentamer with mixing performed using a pipette. Comparison is made to a standard containing AAV capsid, a set of protein standards, or unassembled CompA.

### DETAILED DESCRIPTION OF THE INVENTION

[0068] The present disclosure demonstrates manufacturing of a two-component protein-based Virus-Like Particle (bpVLP) by continuous additional of a component A (compA) protein to a solution of a component B (compB) protein. Advantageously, the compA protein is mixed with the compB protein by slow adding to the compB under conditions that minimize shear stress (e.g., addition under the surface of the compB solution and/or additional without mechanical stirring). The compA:compB assembly may be purified from excess compA by filtration against a 1000 kDa membrane or the equivalent. Optionally the membrane is a regenerated cellulose membrane (e.g., a Pellicon® Ultracel® 1000 kDa membrane or the equivalent).

### Definitions

[0069] All publications, patents and patent applications, including any drawings and appendices therein are incorporated by reference in their entirety for all purposes to the same extent as if each individual publication, patent or patent application, drawing, or appendix was specifically and individually indicated to be incorporated by reference in its entirety for all purposes.

[0070] The term “virus-like particle” or “VLP” refers to a molecular assembly that resembles a virus but is non-infectious that displays an antigenic protein, or antigenic fragment thereof, of a viral protein or glycoprotein. A “protein-based VLP” refers to a VLP formed from proteins or glycoproteins and substantially free of other components (e.g., lipids). Protein-based VLPs may include post-translation modification and chemical modification, but are to be distinguished from micellar VLPs and VLPs formed by extraction of viral proteins from live or live inactivated virus preparations. The term “designed VLP” refers to a VLP comprising one or more polypeptides generated by computational protein design. Illustrative designed VLP are VLPs that comprise nanostructures depicted in FIG. 1B. The term “symmetric VLP” refers to a protein-based VLP with a symmetric core, such as shown in FIG. 1B. These include but are not limited to designed VLPs. For example, the protein ferritin has been used to generate a symmetric, protein-based VLP using naturally occurring ferritin sequences. Ferritin-based VLPs are distinguished from designed VLPs in that no protein engineering is necessary to form a symmetric VLP from ferritin, other than fusing the viral protein to the ferritin molecule. Protein design methods can be used to generate similar one- and two-component nanostructures based on template structures (e.g., structures deposited in the Protein Data Bank) or de novo (i.e., by computational design of new proteins having a desired structure but little or no homology to naturally occurring proteins). Such one- and two-component nanostructures can then be used as the core of a designed VLP.

[0071] The term “icosahedral particle” refers to a designed VLP having a core with icosahedral symmetry (e.g., the particles labeled 153 and 152 in Table 1). 153 refers to an icosahedral particle constructed from pentamers and trimers. 152 refers to an icosahedral particle constructed from pentamers and dimers. T33 refers to a tetrahedral particle constructed from two sets of trimers. T32 refers to a tetrahedral particle constructed from trimers and dimers.

[0072] The term “polypeptide” refers to a series of amino acid residues joined by peptide bonds and optionally one or more post-translational modifications (e.g., glycosylation) and/or other modifications (including but not limited to conjugation of the polypeptide moiety used as a marker—such as a fluorescent tag—or an adjuvant).

[0073] The term “variant” refers to a polypeptide having one or more insertions, deletions, or amino acid substitutions relative to a reference polypeptide, but retains one or more properties of the reference protein.

[0074] The term “functional variant” refers to a variant that exhibits the same or similar functional effect(s) as a reference polypeptide. For example, a functional variant of a multimerization domain is able to promote multimerization to the same extent, or to similar extent, as a reference multimerization domain and/or is able to multimerize with the same cognate multimerization domains as a reference multimerization domain.

[0075] The term “fragment” refers to a polypeptide having one or more N-terminal or C-terminal truncations compared to a reference polypeptide.

[0076] The term “functional fragment” refers to a functional variant of a fragment.

[0077] The term “amino acid substitution” refers to replacing a single amino acid in a sequence with another amino acid residue. The standard form of abbreviations for amino acid substitution are used. For example, V94R refers to substitution of valine (V) in a reference sequence with arginine (R). The abbreviation Arg94 refers to any sequence in which the 94^{th} residue, relative to a reference sequence, is arginine (Arg).

[0078] The terms “helix” or “helical” refer to an α-helical secondary structure in a polypeptide that is known to occur, or predicted to occur. For example, a sequence may be described as helical when computational modeling suggests the sequence is likely to adopt a helical conformation.

[0079] The term “component” refers to a protein, or protein complex, capable of assembly into a virus-like particle under appropriate conditions (e.g., an antigen or polypeptide comprising a multimerization domain). “Component A” or “compA” and “Component B” or “CompB” refer to two proteins capable of assembling to form a pbVLP as described herein. CompA and CompB are capable of independently forming dimer, trimer, or pentamer structures as described herein for use in assembly of the pbVLP. In some embodiments, compA is linked to an antigen to form a fusion protein.

[0080] The term “pharmaceutically acceptable excipients” means excipients biologically or pharmacologically compatible for in vivo use in animals or humans, and can mean excipients approved by a regulatory agency of the Federal or a state government or listed in the U.S. Pharmacopeia or other generally recognized pharmacopeia for use in animals, and more particularly in humans.

[0081] The term “manufacturing” refers to production of a recombinant polypeptide or virus-like particle at any scale, including at least 25-mL, 50-mL, 1-L, 1,000-L, 50,000-L, or greater scale.

[0082] The terms “culturing” and “culture medium” refers to standard cell culture and recombinant protein expression techniques.

[0083] The term “host cell” refers to any cell capable of use in expression of a recombinant polypeptide.

[0084] The term “mixing” refers to placing two solutions into contact to permit the solutions to mix.

[0085] The term “purify” refers to separating a molecule from other substances present in a composition. Polypeptides may be purified by affinity (e.g., to an antibody or to a tag, e.g., using a His-tag capture resin), by charge (e.g., ion-exchange chromatography), by size (e.g., preparative ultracentrifugation, size exclusion chromatography), or otherwise.

[0086] The terms “polynucleotide” and “nucleic acid,” used interchangeably herein, refer to a polymeric form of nucleotides of more than about 100 nucleotides, either ribonucleotides or deoxyribonucleotides. Thus, this term includes, but is not limited to, single-, double-, or multi-stranded DNA or RNA, genomic DNA, cDNA, DNA-RNA hybrids, or a polymer comprising purine and pyrimidine bases or other natural, chemically or biochemically modified, non-natural, or derivatized nucleotide bases. “Oligonucleotide” generally refers to polynucleotides of between about 5 and about 100 nucleotides of single- or double-stranded DNA. However, for the purposes of this disclosure, there is no upper limit to the length of an oligonucleotide. Oligonucleotides are also known as “oligomers” or “oligos” and may be isolated from genes, or chemically synthesized by methods known in the art. The terms “polynucleotide” and “nucleic acid” should be understood to include, as applicable to the embodiments being described, single-stranded (such as sense or antisense) and double-stranded polynucleotides.

[0087] The terms “identity”, “identical”, and “sequence identity” refer to the percentage of bases or amino acids between two polynucleotide or polypeptide sequences that are the same, and in the same relative position. As such one polynucleotide or polypeptide sequence has a certain percentage of sequence identity compared to another polynucleotide or polypeptide sequence. For sequence comparison, typically one sequence acts as a reference sequence, to which test sequences are compared. The term “reference sequence” refers to a molecule to which a test sequence is compared.

[0088] Methods of sequence alignment for comparison and determination of percent sequence identity is well known in the art. Optimal alignment of sequences for comparison can be conducted, e.g., by the homology alignment algorithm of Needleman and Wunsch, (1970) J. Mol. Biol. 48:443, by the search for similarity method of Pearson and Lipman, (1988) Proc. Nat'l. Acad. Sci. USA 85:2444, by computerized implementations of these algorithms (GAP, BESTFIT, FASTA, and TFASTA in the Wisconsin Genetics Software Package, Genetics Computer Group, 575 Science Dr., Madison, Wis.), by manual alignment and visual inspection (see, e.g., Brent et al., (2003) Current Protocols in Molecular Biology), by use of algorithms know in the art including the BLAST and BLAST 2.0 algorithms, which are described in Altschul et al., (1977) Nuc. Acids Res. 25:3389-3402; and Altschul et al., (1990) J. Mol. Biol. 215:403-410, respectively. Software for performing BLAST analyses is publicly available through the National Center for Biotechnology Information.

[0089] The term “about” or “approximately” means within an acceptable error range for the particular value as determined by one of ordinary skill in the art, which will depend in part on how the value is measured or determined, e.g., the limitations of the measurement system. For example, “about” can mean within 1 or more than 1 standard deviation. Alternatively, “about” can mean plus or minus a range of up to 20%, up to 10%, or up to 5%.

[0090] All weight percentages (i.e., “% by weight” and “wt. %” and w/w) referenced herein, unless otherwise indicated, are measured relative to the total weight of the pharmaceutical composition.

[0091] As used herein, “substantially” or “substantial” refers to the complete or nearly complete extent or degree of an action, characteristic, property, state, structure, item, or result. For example, an object that is “substantially” enclosed would mean that the object is either completely enclosed or nearly completely enclosed. The exact allowable degree of deviation from absolute completeness may in some cases depend on the specific context. However, generally speaking, the nearness of completion will be so as to have the same overall result as if absolute and total completion were obtained. The use of “substantially” is equally applicable when used in a negative connotation to refer to the complete or near complete lack of action, characteristic, property, state, structure, item, or result. For example, a composition that is “substantially free of” other active agents would either completely lack other active agents, or so nearly completely lack other active agents that the effect would be the same as if it completely lacked other active agents. In other words, a composition that is “substantially free of” an ingredient or element or another active agent may still contain such an item as long as there is no measurable effect thereof.

[0092] As used herein, the term “denature” refers to a change in the structure of a folded polypeptide molecule that causes the polypeptide to lose all or substantially all tertiary structure, or in the case of a misfolded protein, to convert from an aggregated form into a soluble, unfolded form. The term “denatured” also refers a biologically inactive form of the expressed protein, as obtained as a product of the recombinant production process, after solubilizing inclusion bodies under conditions under which the native three-dimensional structure of the protein is disrupted.

[0093] The term “refolding” (or “renaturing”) refers to a process that causes a denatured protein to regain its native conformation and biological activity.

[0094] As used herein, the term recovering refers to obtaining of a substance (e.g. inclusion bodies and/or a protein of interest) by separating the substance from other substances in a preparation, e.g., by centrifugation and/or one or more wash steps.

[0095] As used herein, the term “inclusion body” refers to insoluble aggregates containing recombinant protein present in the cytoplasm of transformed host cells. These appear as bright spots under the microscope and can be recovered by separation of inclusion bodies from the cytoplasm of the cell. In the prior art, inclusion bodies are typically solubilized using high concentrations of a chaotropic agent (e.g. >8 M urea and/or >3 M guanidinium); a strong ionic detergent (e.g., N-lauroylsarcosine); and/or alkaline pH. According to the present disclosure, lower concentrations of these agents may be used to gently solubilize

[0096] As used herein, the term “nanostructure” include symmetrically repeated, non-natural, non-covalent protein-protein interfaces that orient a first component molecule (e.g. compA) and a second component molecule (e.g. compB) into a structure. Nanostructures include, but are not limited to, delivery vehicles, as the nanostructures can encapsulate molecules of interest and/or the first and/or second proteins can be modified to bind to molecules of interest (diagnostics, therapeutics, detectable molecules for imaging and other applications, etc.). The nanostructures of the disclosure are well suited for several applications, including vaccine design, targeted delivery of therapeutics, and bioenergy.

[0097] As used herein the term “solubilization” refers to a transfer of proteins comprised within a biological sample to a solvent such as an aqueous solvent by disrupting the cells of the biological sample. As used herein, “solubilization” or “solubilize” may be used interchangeably with “to dissolve” or “to extract”. The term “solubilization” also refers to the release a protein from inclusion bodies, e.g., by dissolving the inclusion bodies.

[0098] The following description includes information that may be useful in understanding the present invention. It is not an admission that any of the information provided herein is prior art or relevant to the presently claimed inventions, or that any publication specifically or implicitly referenced is prior art.

### EMBODIMENTS

[0099] Manufacturing capacity is determined by several factors. The amount of time required to make and release a batch (the run rate) is one of those factors. A continuous approach to manufacturing can reduce batch manufacturing and release time considerably thus increasing the capacity of a given facility or new investment. As disclosure herein, component flow rates may be controlled to maintain proper order of addition and molar ratios of the components. In the methods of the disclosure, compA protein is mixed with pre-manufactured compB. The compA protein may be provided in excess to the compB protein. Optionally, compA protein is added to the compB protein as the compA protein emerges from the last step in its purification process. Mixing of the components may be performed by static mixing elements or the equivalent. In some cases, the mixed components are delivered directly from the continuous assembly reaction to a 1000 kDa membrane processing unit. There may, in some cases, be a dwell time prior to contacting the assembly to the 1000 kDa membrane. The unit may operate in single-pass tangential flow filtration (TFF) mode. Advantageously, the method yields a steady stream of formulated drug substance (DS) ready for frozen storage. This approach may obviate the compA TFF formulation step and several vessels and hold steps in the compA process prior to pbVLP assembly. Advantageously, compA batch release and associated activities may not be necessary.

[0100] In some embodiments, compA may also be manufactured via continuous processing. Continuous compA manufacturing and assembly processes may be integrated into one continuous process running from bioreactor harvest directly to finished pbVLP DS.

[0101] In some embodiments, one integrated compA-to-DS continuous processing line is sized to match with about six bioreactors. The bioreactors would be harvested in a serial fashion. For example, a bioreactor is harvested and a drug substance is produced three days later (˜60 hr cycle) just as the next bioreactor is ready to harvest.

Protein-Based Virus Like Particle (pbVLP)

[0102] Vaccination is a treatment modality used to prevent or decrease the severity of infection with various infectious agents, including bacteria, viruses, and parasites. Development of new vaccines has important commercial and public health implications. In particular, lyme disease, pertussis, herpes virus, orthomyxovirus, paramyxovirus, pneumovirus, filovirus, flavivirus, reovirus, retrovirus, coronovirus, and malaria are infectious agents for which vaccines already exist, are being developed, or would be desirable.

[0103] Subunit vaccines are vaccines made from isolated antigens, usually proteins expressed recombinantly in bacterial, insect, or mammalian cell hosts. Typically, the antigenic component of a subunit vaccine is selected from among the proteins of an infectious agent observed to elicit a natural immune response upon infection, although in some cases other components of the infectious agent can be used. Typical antigens for use in subunit vaccines include protein expressed on the surface of the target infectious agent, as such surface-expressed envelope glycoproteins of viruses. Preferably, the antigen is a target for neutralizing antibodies. More preferably, the antigen is a target for broadly neutralizing antibodies, such that the immune response to the antigen covers immunity against multiple strains of the infectious agent. In some cases, glycans that are N-linked or O-linked to the subunit vaccine may also be important in vaccination, either by contributing to the epitope of the antigen or by guiding the immune response to particular epitopes on the antigen by steric hindrance. The immune response that occurs in response to vaccination may be direct to the protein itself, to the glycan, or to both the protein and linked glycans. Subunit vaccines have various advantages including that they contain no live pathogen, which eliminates concerns about infection of the patient by the vaccine; they may be designed using standard genetic engineering techniques; they are more homogenous than other forms of vaccine; and they can be manufactured in standardized recombinant protein expression production systems using well-characterized expression systems. In some cases, the antigen may be genetically engineered to favor generation of desirable antibodies, such as neutralizing or broadly neutralizing antibodies. In particular, structural information about an antigen of interest, obtained by X-ray crystallography, electron microscopy, or nuclear magnetic resonance experiments, can be used to guide rational design of subunit vaccines.

[0104] A known limitation of subunit vaccines is that the immune response elicited may sometimes be weaker than the immune response to other types of vaccines, such as whole virus, live, or live-attenuated vaccines. Designed and/or protein-based VLP vaccines have the potential to harness the advantages of subunit vaccines while increasing the potency and breadth of the vaccine-induced immune response through multivalent display of the antigen in symmetrically ordered arrays. In the present disclosure, protein-based VLPs are distinguished from nanoparticle vaccines, because the term nanoparticle vaccine has been used in the art to refer to protein-based or glycoprotein-based vaccines (see, e.g. U.S. Pat. No. 9,441,019), polymerized liposomes (see, e.g., U.S. Pat. No. 7,285,289), surfactant micelles (see, e.g., US Patent Pub. No. US 2004/0038406 A1), and synthetic biodegradable particles (see, e.g., U.S. Pat. No. 8,323,696).

[0105] A non-limiting example of an embodiment is shown in FIG. 1A, which depicts a protein antigen genetically fused to a component A (compA) protein of the pbVLP, which optionally is expressed recombinantly in a host cell (e.g., 293F cells); along with a component B (compB) protein assembly, which is expressed recombinantly in a host cell (e.g., E. coli cells), these two components self-assembling into a pbVLP displaying 20 copies of the protein antigen around an icosahedral core.

[0106] In some embodiments, compA is a dimer. In some embodiments, compA is a trimer. In some embodiments, compA is a pentamer.

[0107] In some embodiments, compB is a dimer. In some embodiments, compB is a trimer. In some embodiments, compA is a pentamer.

[0108] In some embodiments, compA is a dimer selected from SEQ ID Nos: 13,17, or 41. In some embodiments, compA is a trimer selected from SEQ ID Nos: 5, 7, 9, 19, 21, 25, 26, 29, 30, 31, 37, 39, 43, 45, 47, 49, or 51. In some embodiments, compA is a pentamer selected from SEQ ID Nos: 3, 11, 15, 23, or 35.

[0109] In some embodiments, compB is a dimer selected from SEQ ID Nos: 12, 16, 20, or 22. In some embodiments, compB is a trimer selected from SEQ ID Nos: 4, 18, 24, 34, 36, 42, 44, 46, 48, or 50. In some embodiments, compB is a pentamer selected from SEQ ID Nos: 2, 6, 8, 10, 14, 27, 28, 32, 33, 38, or 40.

[0110] In some embodiments, compA comprises a polypeptide sequence that has at least 90%, at least 95%, at least at least 99%, or 100% identity to any one of SEQ IN NOs: 1, 3, 5, 7, 9, 11, 13, 15, 17, 19, 21, 23, 25, 26, 29-31, 35, 37, 39, 41, 43, 45, 47, 49, 51, 53, 55, 57, and 59.

[0111] In some embodiments, compB comprises a polypeptide sequence that has at least 90%, at least 95%, at least 99%, or 100% identity to any one of SEQ IN NOs: 2, 4, 6, 8, 10, 12, 14, 16, 18, 20, 22, 24, 27, 28, 32-34, 36, 38, 40, 42, 44, 46, 48, 50, 52, 54, 56, and 58.

[0112] In some embodiments, compA and Comp B form an “153” architecture. An 153 architecture is a combination of 12 pentameric building blocks and twenty trimeric building blocks aligned along the five-fold and three-fold icosahedral symmetry axes as described in Bale et al., Science 353:389-394 (2016). In some embodiments, compA is the 153 pentamer. In some embodiments, compA is the 153 trimer. In some embodiments, compB is the 153 pentamer. In some embodiments, compB is the 153 trimer.

[0113] In some embodiments, compA and compB form an “152” architecture. An 152 architecture is formed from twelve pentamers and thirty dimers along their corresponding icosahedral symmetry axes. In some embodiments, compA is the 152 pentamer. In some embodiments, compA is the 152 dimer. In some embodiments, compB is the 152 pentamer. In some embodiments, compB is the 152 dimer.

[0114] In some embodiments, compA and compB form an “132” architecture. An 132 architecture is a combination of twenty trimers and thirty dimers, each aligned along their corresponding icosahedral symmetry axes. In some embodiments, compA is the 132 trimer. In some embodiments, compA is the 132 dimer. In some embodiments, compB is the 132 trimer. In some embodiments, compB is the 132 dimer.

[0115] In some embodiments, a mixture of compA and compB forms an icosahedral nanostructure. In some embodiments, a mixture of compA and compB forms a tetrahedral nanostructure. In some embodiments, a mixture of compA and compB forms an octahedral nanostructure.

[0116] In some embodiments, a small-molecule drug (i.e., with MW of less than 700), biological drug (i.e., drugs isolated from a bacterium, yeast, cell, or organ, especially including recombinant polypeptides), or biosynthetic drugs (e.g., aptamers, antisense nucleic acid, siRNA, recombinant nucleic acid, nucleoside analogs, recombinant polypeptides, polypeptide drugs, antigens, etc) is fused to compA.

[0117] In some embodiments, an antigen is fused to compA

[0118] In some embodiments, compA and compB form a nanostructure.

[0119] In some embodiments, the nanostructure is formed by combining a compA selected from one of SEQ ID NOs: 1, 3, 5, 7, 9, 11, 13, 15, 17, 19, 21, 23, 25, 26, 29-31, 35, 37, 39, 41, 43, 45, 47, 49, 51, 53, 55, 57, and 59, and a compB selected from one of SEQ ID NOs: 2, 4, 6, 8, 10, 12, 14, 16, 18, 20, 22, 24, 27, 28, 32-34, 36, 38, 40, 42, 44, 46, 48, 50, 52, 54, 56, and 58.

[0120] In some embodiments, the nanostructure is formed from a compA and compB polypeptide sequence that has at least 90%, at least 95%, at least 99%, or 100% identity to any one of:
[0121] (i) SEQ ID NO:1 and SEQ ID NO:2 respectively;
[0122] (ii) SEQ ID NO:3 and SEQ ID NO:4 respectively;
[0123] (iii) SEQ ID NO:3 and SEQ ID NO:24 respectively;
[0124] (iv) SEQ ID NO:23 and SEQ ID NO:4 respectively;
[0125] (v) SEQ ID NO:35 and SEQ ID NO:36 respectively;
[0126] (vi) SEQ ID NO:5 and SEQ ID NO:6 respectively;
[0127] (vii) SEQ ID NO:5 and SEQ ID NO:27 respectively;
[0128] (viii) SEQ ID NO:5 and SEQ ID NO:28 respectively;
[0129] (ix) SEQ ID NO:25 and SEQ ID NO:6 respectively;
[0130] (x) SEQ ID NO:25 and SEQ ID NO:27 respectively;
[0131] (xi) SEQ ID NO:25 and SEQ ID NO:28 respectively;
[0132] (xii) SEQ ID NO:26 and SEQ ID NO:6 respectively;
[0133] (xiii) SEQ ID NO:26 and SEQ ID NO:27 respectively;
[0134] (xiv) SEQ ID NO:26 and SEQ ID NO:28 respectively;
[0135] (xv) SEQ ID NO:37 and SEQ ID NO:38 respectively;
[0136] (xvi) SEQ ID NO:7 and SEQ ID NO:8 respectively;
[0137] (xvii) SEQ ID NO:7 and SEQ ID NO:32 respectively;
[0138] (xviii) SEQ ID NO:7 and SEQ ID NO:33 respectively;
[0139] (xix) SEQ ID NO:7 and SEQ ID NO:34 respectively;
[0140] (xx) SEQ ID NO:29 and SEQ ID NO:8 respectively;
[0141] (xxi) SEQ ID NO:29 and SEQ ID NO:32 respectively;
[0142] (xxii) SEQ ID NO:29 and SEQ ID NO:33 respectively;
[0143] (xxiii) SEQ ID NO:29 and SEQ ID NO:34 respectively;
[0144] (xxiv) SEQ ID NO:30 and SEQ ID NO:8 respectively;
[0145] (xxv) SEQ ID NO:30 and SEQ ID NO:32 respectively;
[0146] (xxvi) SEQ ID NO:30 and SEQ ID NO:33 respectively;
[0147] (xxvii) SEQ ID NO:30 and SEQ ID NO:34 respectively;
[0148] (xxviii) SEQ ID NO:31 and SEQ ID NO:8 respectively;
[0149] (xxix) SEQ ID NO:31 and SEQ ID NO:32 respectively;
[0150] (xxx) SEQ ID NO:31 and SEQ ID NO:33 respectively;
[0151] (xxxi) SEQ ID NO:31 and SEQ ID NO:34 respectively;
[0152] (xxxii) SEQ ID NO:39 and SEQ ID NO:40 respectively;
[0153] (xxxiii) SEQ ID NO:9 and SEQ ID NO:10 respectively;
[0154] (xxxiv) SEQ ID NO:11 and SEQ ID NO:12 respectively;
[0155] (xxxv) SEQ ID NO:13 and SEQ ID NO:14 respectively;
[0156] (xxxvi) SEQ ID NO:15 and SEQ ID NO:16 respectively;
[0157] (xxxvii) SEQ ID NO:19 and SEQ ID NO:20 respectively;
[0158] (xxxviii) SEQ ID NO:21 and SEQ ID NO:22 respectively;
[0159] (xxxix) SEQ ID NO:23 and SEQ ID NO:24 respectively;
[0160] (xl) SEQ ID NO:41 and SEQ ID NO:42 respectively;
[0161] (xli) SEQ ID NO:43 and SEQ ID NO:44 respectively;
[0162] (xlii) SEQ ID NO:45 and SEQ ID NO:46 respectively;
[0163] (xliii) SEQ ID NO:47 and SEQ ID NO:48 respectively;
[0164] (xliv) SEQ ID NO:49 and SEQ ID NO:50 respectively;
[0165] (xlv) SEQ ID NO:51 and SEQ ID NO:44 respectively;
[0166] (xlvi) SEQ ID NO:53 and SEQ ID NO:52 respectively;
[0167] (xlvii) SEQ ID NO:55 and SEQ ID NO:54 respectively;
[0168] (xlviii) SEQ ID NO:57 and SEQ ID NO:56 respectively; and
[0169] (xlix) SEQ ID NO:59 and SEQ ID NO:58 respectively.

[0170] In some embodiments, compA comprises a helical extension. In some embodiments, the helical extension is located at the N-terminus of compA. In some embodiments, the helical extension is EKAAKAEEAARK (SEQ ID NO: 62).

[0171] In some embodiments, compB comprises a helical extension. In some embodiments, the helical extension is located at the N-terminus of compB. In some embodiments, the helical extension is EKAAKAEEAARK (SEQ ID NO: 62).

[0172] In some embodiments, the nanostructure is a pbVLP. In some embodiments, the pbVLP is a vaccine.

[0173] Other compA/compB assemblies of the present disclosure are shown in FIG. 1B. In some embodiments, the pbVLP is adapted for display of up to 8 trimers; 8 trimers and 12 dimers; 6 tetramers and 12 dimers; 6 tetramers and 8 trimers; 20 trimers and 30 dimers; 4 trimers and 6 dimers; 4 first trimers and 4 second trimers, or 8 trimers; 12 pentamers and 20 trimers; or 12 pentamers and 30 dimers; or 4 trimers. In some cases, one of the symmetric axes is not used for antigen display, thus, in some embodiments the pbVLP is adapted for display of up to 8 trimers; 12 dimers; 6 tetramers; 20 trimers; 30 dimers; 4 trimers; 6 dimers; 8 trimers; or 12 pentamers. In some cases, monomeric antigens are displayed and thus, the pbVLP is adapted for display of up to 12, 24, 60, or 70 monomeric antigens. In some cases, the pbVLP comprises mixed pluralities of polypeptides such that otherwise identical polypeptides of the core of the pbVLP display different antigens or no antigen. Thus, depending on the ratio of polypeptides, the pbVLP is in some cases adapted for display of between 1 and 130 antigens (e.g., on the 152 particle) where each of the antigens displayed may be the same or may be different members of mixed population in proportion to any ratio chosen. The antigens may be co-expressed in a recombinant expression system and self-assembled before purification. Non-limiting exemplary pbVLPs are provided in Bale et al. Science 353:389-94 (2016); Heinze et al. J. Phys. Chem B. 120:5945-5952 (2016); King et al. Nature 510:103-108 (2014); and King et al. Science 336:1171-71 (2012).

[0174] The compA and compB proteins of the present disclosure may have any of various amino acid sequences. U.S. Patent Pub No. US 2015/0356240 A1 describes various methods for designing protein assemblies. As described in US Patent Pub No. US 2016/0122392 A1 and in International Patent Pub. No. WO 2014/124301 A1, the isolated polypeptides of SEQ ID NOS:1-51 were designed for their ability to self-assemble in pairs to form pbVLPs, such as icosahedral particles. The design involved design of suitable interface residues for each member of the polypeptide pair that can be assembled to form the pbVLP. The pbVLPs so formed include symmetrically repeated, non-natural, non-covalent polypeptide-polypeptide interfaces that orient a first assembly and a second assembly into a pbVLP, such as one with an icosahedral symmetry. Thus, in one embodiment the compA and compBs (that is, the two polypeptides of the core of the VLP) are selected from the group consisting of SEQ ID NOS:1-51. In each case, an N-terminal methionine residue present in the full-length protein but typically removed to make a fusion is not included in the sequence. In various embodiments, one or more additional residues are deleted from the N-terminus and/or additional residues are added to the N-terminus (e.g. to form a helical extension). As shown in FIG. 2, the sequences disclosed below group into several families of related protein sequences.

TABLE 1

| | | | Identified |
|---|---|---|---|
| | Component | | interface |
| Name | Multimer | Amino Acid Sequence | residues |
| I53-34A | trimer | EGMDPLAVLAESRLLPLLTVRGGEDLAGLATVLELMGVGALEITLRTEKGLE | I53-34A: |
| SEQ ID NO: 1 | | ALKALRKSGLLLGAGTVRSPKEAEAALEAGAAFLVSPGLLEEVAALAQARGV | 28, 32, 36, 37, |
| | | PYLPGVLTPTEVERALALGLSALKFFPAEPFQGVRVLRAYAEVFPEVRFLPT | 186, 188, 191, |
| | | GGIKEEHLPHYAALPNLLAVGGSWLLQGDLAAVMKKVKAAKALLSPQAPG | 192, 195 |
| I53-34B | pentamer | TKKVGIVDTTFARVDMAEAAIRTLKALSPNIKIIRKTVPGIKDLPVACKKLL | I53-34B: |
| SEQ ID NO: 2 | | EEEGCDIVMALGMPGKAEKDKVCAHEASLGLMLAQLMTNKHIIEVFVHEDEA | 19, 20, 23, 24, |
| | | KDDDELDILALVRAIEHAANVYYLLFKPEYLTRMAGKGLRQGREDAGPARE | 27, 109, 113, |
| | | | 116, 117, 120, |
| | | | 124, 148 |
| I53-40A | pentamer | TKKVGIVDTTFARVDMASAAILTLKMESPNIKIIRKTVPGIKDLPVACKKLL | I53-40A: |
| SEQ ID NO: 3 | | EEEGCDIVMALGMPGKAEKDKVCAHEASLGLMLAQLMTNKHIIEVFVHEDEA | 20, 23, 24, 27, |
| | | KDDAELKILAARRAIEHALNVYYLLFKPEYLTRMAGKGLRQGFEDAGPARE | 28, 109, 112, |
| | | | 113, 116, 120, |
| | | | 124 |
| I53-40B | trimer | STINNQLKALKVIPVIAIDNAEDIIPLGKVLAENGLPAAEITFRSSAAVKAI | I53-40B: |
| SEQ ID NO: 4 | | MLLRSAQPEMLIGAGTILNGVQALAAKEAGATFVVSPGFNPNTVRACQIIGI | 47, 51, 54, 58, |
| | | DIVPGVNNPSTVEAALEMGLTTLKFFPAEASGGISMVKSLVGPYGDIRLMPT | 74, 102 |
| | | GGITPSNIDNYLAIPQVLACGGTWMVDKKLVTNGEWDEIARLTREIVEQVNP | |
| I53-47A | trimer | PIFTLNTNIKATDVPSDFLSLTSRLVGLILSKPGSYVAVHINTDQQLSFGGS | I53-47A: |
| SEQ ID NO: 5 | | TNPAAFGTLMSIGGIEPSKNRDHSAVLFDHLNAMLGIPKNRMYIHFVNLNGD | 22, 25, 29, 72, |
| | | DVGWNGTTF | 79, 86, 87 |
| I53-47B | pentamer | NQHSHKDYETVRIAVVRARWHADIVDACVEAFEIAMAAIGGDRFAVDVFDVP | I53-47B: |
| SEQ ID NO: 6 | | GAYEIPLHARTLAETGRYGAVLGTAFVVNGGIYRHEFVASAVIDGMMNVQLS | 28, 31, 35, 36, |
| | | TGVPVLSAVLTPHRYRDSAEHHRFFAAHFAVKGVEAARACIEILAAREKIAA | 39, 131, 132, |
| | | | 135, 139, 146 |
| I53-50A | trimer | MEELFKKHKIVAVLRANSVEEAIEKAVAVFAGGVHLIEITFTVPDADTVIKA | I53-50A: |
| SEQ ID NO: 7 | | LSVLKEKGAIIGAGTVTSVEQCRKAVESGAEFIVSPHLDEEISQFCKEKGVF | 25, 29, 33, 54, |
| | | YMPGVMTPTELVKAMKLGHTILKLFPGEVVGPQFVKAMKGPFPNVKFVPTGG | 57 |
| | | VNLDNVCEWFKAGVLAVGVGSALVKGTPDEVREKAKAFVEKIRGCTE | |
| I53-50B | pentamer | NQHSHKDYETVRIAVVRARWHAEIVDACVSAFEAAMADIGGDRFAVDVFDVP | I53-50B: |
| SEQ ID NO: 8 | | GAYEIPLHARTLAETGRYGAVLGTAFVVNGGIYRHEFVASAVIDGMMNVQLS | 24, 28, 36, 124, |
| | | TGVPVLSAVLTPHRYRDSDAHTLLFLALFAVKGMEAARACVEILAAREKIAA | 125, 127, 128, |
| | | | 129, |
| | | | 131, 132, 133, |
| | | | 135, 139 |
| I53-51A | trimer | FTKSGDDGNTNVINKRVGKDSPLVNFLGDLDELNSFIGFAISKIPWEDMKKD | I53-51A: |
| SEQ ID NO: 9 | | LERVQVELFEIGEDLSTQSSKKKIDESYVLWLLAATAIYRIESGPVKLFVIP | 80, 83, 86, 87, |
| | | GGSEEASVLHVTRSVARRVERNAVKYTKELPEINRMIIVYLNRLSSLLFAMA | 88, 90, 91, 94, |
| | | LVANKRRNQSEKIYEIGKSW | 166, 172, 176 |
| I53-51B | pentamer | NQHSHKDYETVRIAVVRARWHADIVDQCVRAFEEAMADAGGDRFAVDVFDVP | I53-51B: |
| SEQ ID | | GAYEIPLHARTLAETGRYGAVLGTAFVVNGGIYRHEFVASAVIDGMMNVQLS | 31, 35, 36, 40, |
| NO: 10 | | TGVPVLSAVLTPHRYRSSREHHEFFREHFMVKGVEAAAACITILAAREKIAA | 122, 124, 128, |
| | | | 131, 135, 139, |
| | | | 143, 146, 147 |
| I52-03A | pentamer | GHTKGPTPQQHDGSALRIGIVHARWNKTIIMPLLIGTIAKLLECGVKASNIV | I52-03A: |
| SEQ ID | | VQSVPGSWELPIAVQRLYSASQLQTPSSGPSLSAGDLLGSSTTDLTALPTTT | 28, 32, 36, 39, |
| NO: 11 | | ASSTGPFDALIAIGVLIKGETMHFEYIADSVSHGLMRVQLDTGVPVIFGVLT | 44, 49 |
| | | VLTDDQAKARAGVIEGSHNHGEDWGLAAVEMGVRRRDWAAGKTE | |
| I52-03B | dimer | YEVDHADVYDLFYLGRGKDYAAEASDIADLVRSRTPEASSLLDVACGTGTHL | I52-03B: |
| SEQ ID | | EHFTKEFGDTAGLELSEDMLTHARKRLPDATLHQGDMRDFQLGRKFSAVVSM | 94, 115, 116, |
| NO: 12 | | FSSVGYLKTVAELGAAVASFAEHLEPGGVVVVEPWWFPETFADGWVSADVVR | 206, 213 |
| | | RDGRTVARVSHSVREGNATRMEVHFTVADPGKGVRHFSDVHLITLFHQREYE | |
| | | AAFMAAGLRVEYLEGGPSGRGLFVGVPA | |
| I52-32A | dimer | GMKEKFVLIITHGDFGKGLLSGAEVIIGKQENVHTVGLNLGDNIEKVAKEVM | I52-32A: |
| SEQ ID | | RIIIAKLAEDKEIIIVVDLFGGSPFNIALEMMKTFDVKVITGINMPMLVELL | 47, 49, 53, 54, |
| NO: 13 | | TSINVYDTTELLENISKIGKDGIKVIEKSSLKM | 57, 58, 61, 83, |
| | | | 87, 88 |
| I52-32B | pentamer | KYDGSKLRIGILHARWNLEIIAALVAGAIKRLQEFGVKAENIIIETVPGSFE | I52-32B: |
| SEQ ID | | LPYGSKLFVEKQKRLGKPLDAIIPIGVLIKGSTMHFEYICDSTTHQLMKLNF | 19, 20, 23, 30, |
| NO: 14 | | ELGIPVIFGVLTCLTDEQAEARAGLIEGKMHNHGEDWGAAAVEMATKFN | 40 |
| I52-33A | pentamer | AVKGLGEVDQKYDGSKLRIGILHARWNRKIILALVAGAVLRLLEFGVKAENI | I52-33A: |
| SEQ ID | | IIETVPGSFELPYGSKLFVEKQKRLGKPLDAIIPIGVLIKGSTMHFEYICDS | 33, 41, 44, 50 |
| NO: 15 | | TTHQLMKLNFELGIPVIFGVLTCLTDEQAEARAGLIEGKMHNHGEDWGAAAV | |
| | | EMATKFN | |
| I52-33B | dimer | GANWYLDNESSRLSFTSTKNADIAEVHRFLVLHGKVDPKGLAEVEVETESIS | I52-33B: |
| SEQ ID | | TGIPLRDMLLRVLVFQVSKFPVAQINAQLDMRPINNLAPGAQLELRLPLTVS | 61, 63, 66, 67, |
| NO: 16 | | LRGKSHSYNAELLATRLDERRFQVVTLEPLVIHAQDFDMVRAFNALRLVAGL | 72, 147, 148, |
| | | SAVSLSVPVGAVLIFTAR | 154, 155 |
| I32-06A | dimer | TDYIRDGSAIKALSFAIILAEADLRHIPQDLQRLAVRVIHACGMVDVANDLA | I32-06A: |
| SEQ ID | | FSEGAGKAGRNALLAGAPILCDARMVAEGITRSRLPADNRVIYTLSDPSVPE | 9, 12, 13, 14, |
| NO: 17 | | LAKKIGNTRSAAALDLWLPHIEGSIVAIGNAPTALFRLFELLDAGAPKPALI | 20, 30, 33, 34 |
| | | IGMPVGFVGAAESKDELAANSRGVPYVIVRGRRGGSAMTAAAVNALASERE | |
| I32-06B | trimer | ITVFGLKSKLAPRREKLAEVIYSSLHLGLDIPKGKHAIRFLCLEKEDFYYPF | I32-06B: |
| SEQ ID | | DRSDDYTVIEINLMAGRSEETKMLLIFLLFIALERKLGIRAHDVEITIKEQP | 24, 71, 73, 76, |
| NO: 18 | | AHCWGFRGRTGDSARDLDYDIYV | 77, 80, 81, 84, |
| | | | 85, 88, 114, 118 |
| I32-19A | trimer | GSDLQKLQRFSTCDISDGLLNVYNIPTGGYFPNLTAISPPQNSSIVGTAYTV | I32-19A: |
| SEQ ID | | LFAPIDDPRPAVNYIDSVPPNSILVLALEPHLQSQFHPFIKITQAMYGGLMS | 208, 213, 218, |
| NO: 19 | | TRAQYLKSNGTVVFGRIRDVDEHRTLNHPVFAYGVGSCAPKAVVKAVGTNVQ | 222, 225, 226, |
| | | LKILTSDGVTQTICPGDYIAGDNNGIVRIPVQETDISKLVTYIEKSIEVDRL | 229, 233 |
| | | VSEAIKNGLPAKAAQTARRMVLKDYI | |
| I32-19B | dimer | SGMRVYLGADHAGYELKQAIIAFLKMTGHEPIDCGALRYDADDDYPAFCIAA | I32-19B: |
| SEQ ID | | ATRTVADPGSLGIVLGGSGNGEQIAANKVPGARCALAWSVQTAALAREHNNA | 20, 23, 24, 27, |
| NO: 20 | | QLIGIGGRMHTLEEALRIVKAFVTTPWSKAQRHQRRIDILAEYERTHEAPPV | 117, 118, 122, |
| | | PGAPA | 125 |
| I32-28A | trimer | GDDARIAAIGDVDELNSQIGVLLAEPLPDDVRAALSAIQHDLFDLGGELCIP | I32-28A: |
| SEQ ID | | GHAAITEDHLLRLALWLVHYNGQLPPLEEFILPGGARGAALAHVCRTVCRRA | 60, 61, 64, 67, |
| NO: 21 | | ERSIKALGASEPLNIAPAAYVNLLSDLLFVLARVLNRAAGGADVLWDRTRAH | 68, 71, 110, 120, |
| | | | 123, 124, 128 |
| I32-28B | dimer | ILSAEQSFTLRHPHGQAAALAFVREPAAALAGVQRLRGLDSDGEQVWGELLV | I32-28B: |
| SEQ ID | | RVPLLGEVDLPFRSEIVRTPQGAELRPLTLTGERAWVAVSGQATAAEGGEMA | 35, 36, 54, 122, |
| NO: 22 | | FAFQFQAHLATPEAEGEGGAAFEVMVQAAAGVTLLLVAMALPQGLAAGLPPA | 129, 137, 140, |
| | | | 141, 144, 148 |
| I53-40A.1 | pentamer | TKKVGIVDTTFARVDMASAAILTLKMESPNIKIIRKTVPGIKDLPVACKKLL | I53-40A: |
| SEQ ID | | EEEGCDIVMALGMPGKKEKDKVCAHEASLGLMLAQLMTNKHIIEVFVHEDEA | 20, 23, 24, 27, |
| NO: 23 | | KDDAELKILAARRAIEHALNVYYLLFKPEYLTRMAGKGLRQGFEDAGPARE | 28, 109, 112, |
| | | | 113, 116, 120, |
| | | | 124 |
| I53-40B.1 | trimer | DDINNQLKRLKVIPVIAIDNAEDIIPLGKVLAENGLPAAEITFRSSAAVKAI | I53-40B: |
| SEQ ID | | MLLRSAQPEMLIGAGTILNGVQALAAKEAGADFVVSPGFNPNTVRACQIIGI | 47, 51, 54, 58, |
| NO: 24 | | DIVPGVNNPSTVEQALEMGLTTLKFFPAEASGGISMVKSLVGPYGDIRLMPT | 74, 102 |
| | | GGITPDNIDNYLAIPQVLACGGTWMVDKKLVRNGEWDEIARLTREIVEQVNP | |
| I53-47A.1 | trimer | PIFTLNTNIKADDVPSDFLSLTSRLVGLILSKPGSYVAVHINTDQQLSFGGS | I53-47A: |
| SEQ ID | | TNPAAFGTLMSIGGIEPDKNRDHSAVLFDHLNAMLGIPKNRMYIHFVNLNGD | 22, 25, 29, 72, |
| NO: 25 | | DVGWNGTTF | 79, 86, 87 |
| I53- | trimer | PIFTLNTNIKADDVPSDFLSLTSRLVGLILSEPGSYVAVHINTDQQLSFGGS | I53-47A: |
| 47A.1NegT2 | | TNPAAFGTLMSIGGIEPDKNEDHSAVLFDHLNAMLGIPKNRMYIHFVDLDGD | 22, 25, 29, 72, |
| SEQ ID | | DVGWNGTTF | 79, 86, 87 |
| NO: 26 | | | |
| I53-47B.1 | pentamer | NQHSHKDHETVRIAVVRARWHADIVDACVEAFEIAMAAIGGDRFAVDVFDVP | I53-47B: |
| SEQ ID | | GAYEIPLHARTLAETGRYGAVLGTAFVVNGGIYRHEFVASAVIDGMMNVQLD | 28, 31, 35, 36, |
| NO: 27 | | TGVPVLSAVLTPHRYRDSDEHHRFFAAHFAVKGVEAARACIEILNAREKIAA | 39, 131, 132, |
| | | | 135, 139, 146 |
| I53- | pentamer | NQHSHKDHETVRIAVVRARWHADIVDACVEAFEIAMAAIGGDRFAVDVFDVP | I53-47B: |
| 47B.1NegT2 | | GAYEIPLHARTLAETGRYGAVLGTAFVVDGGIYDHEFVASAVIDGMMNVQLD | 28, 31, 35, 36, |
| SEQ ID | | TGVPVLSAVLTPHEYEDSDEDHEFFAAHFAVKGVEAARACIEILNAREKIAA | 39, 131, 132, |
| NO: 28 | | | 135, 139, 146 |
| I53-50A.1 | trimer | EELFKKHKIVAVLRANSVEEAIEKAVAVFAGGVHLIEITFTVPDADTVIKAL | I53-50A: |
| SEQ ID | | SVLKEKGAIIGAGTVTSVEQCRKAVESGAEFIVSPHLDEEISQFCKEKGVFY | 25, 29, 33, 54, |
| NO: 29 | | MPGVMTPTELVKAMKLGHDILKLFPGEVVGPQFVKAMKGPFPNVKFVPTGGV | 57 |
| | | NLDNVCEWFKAGVLAVGVGDALVKGDPDEVREKAKKFVEKIRGCTE | |
| I53- | trimer | EELFKKHKIVAVLRANSVEEAIEKAVAVFAGGVHLIEITFTVPDADTVIKAL | I53-50A: |
| 50A.1NegT2 | | SVLKEKGAIIGAGTVTSVEQCRKAVESGAEFIVSPHLDEEISQFCKEKGVFY | 25, 29, 33, 54, |
| SEQ ID | | MPGVMTPTELVKAMKLGHDILKLFPGEVVGPEFVEAMKGPFPNVKFVPTGGV | 57 |
| NO: 30 | | DLDDVCEWFDAGVLAVGVGDALVEGDPDEVREDAKEFVEEIRGCTE | |
| I53- | trimer | EELFKKHKIVAVLRANSVEEAIEKAVAVFAGGVHLIEITFTVPDADTVIKAL | I53-50A: |
| 50A.1PosT1 | | SVLKEKGAIIGAGTVTSVEQCRKAVESGAEFIVSPHLDEEISQFCKEKGVFY | 25, 29, 33, 54, |
| SEQ ID | | MPGVMTPTELVKAMKLGHDILKLFPGEVVGPQFVKAMKGPFPNVKFVPTGGV | 57 |
| NO: 31 | | NLDNVCKWFKAGVLAVGVGKALVKGKPDEVREKAKKFVKKIRGCTE | |
| I53-50B.1 | pentamer | NQHSHKDHETVRIAVVRARWHAEIVDACVSAFEAAMRDIGGDRFAVDVFDVP | I53-50B: |
| SEQ ID | | GAYEIPLHARTLAETGRYGAVLGTAFVVNGGIYRHEFVASAVIDGMMNVQLD | 24, 28, 36, 124, |
| NO: 32 | | TGVPVLSAVLTPHRYRDSDAHTLLFLALFAVKGMEAARACVEILAAREKIAA | 125, 127, 128, |
| | | | 129, 131, 132, |
| | | | 133, 135, 139 |
| I53- | pentamer | NQHSHKDHETVRIAVVRARWHAEIVDACVSAFEAAMRDIGGDRFAVDVFDVP | I53-50B: |
| 50B.1NegT2 | | GAYEIPLHARTLAETGRYGAVLGTAFVVDGGIYDHEFVASAVIDGMMNVQLD | 24, 28, 36, 124, |
| SEQ ID | | TGVPVLSAVLTPHEYEDSDADTLLFLALFAVKGMEAARACVEILAAREKIAA | 125, 127, 128, |
| NO: 33 | | | 129, 131, 132, |
| | | | 133, 135, 139 |
| I53- | trimer | NQHSHKDHETVRIAVVRARWHAEIVDACVSAFEAAMRDIGGDRFAVDVFDVP | I53-50B: |
| 50B.4PosT1 | | GAYEIPLHARTLAETGRYGAVLGTAFVVNGGIYRHEFVASAVINGMMNVQLN | 24, 28, 36, 124, |
| SEQ ID | | TGVPVLSAVLTPHNYDKSKAHTLLFLALFAVKGMEAARACVEILAAREKIAA | 125, 127, 128, |
| NO: 34 | | | 129, 131, 132, |
| | | | 133, 135, 139 |
| I53-40A | pentamer | TKKVGIVDTTFARVDMASAAILTLKMESPNIKIIRKTVPGIKDLPVACKKLL | |
| genus | | EEEGCDIVMALGMPGK(A/K)EKDKVCAHEASLGLMLAQLMTNKHIIEVFVH | |
| SEQ ID | | EDEAKDDAELKILAARRAIEHALNVYYLLFKPEYLTRMAGKGLRQGFEDAGP | |
| NO: 35 | | ARE | |
| I53-40B | trimer | (S/D)(T/D)INNQLK(A/R)LKVIPVIAIDNAEDIIPLGKVLAENGLPAAE | |
| genus | | ITFRSSAAVKAIMLLRSAQPEMLIGAGTILNGVQALAAKEAGA(T/D)FVVS | |
| SEQ ID | | PGFNPNTVRACQIIGIDIVPGVNNPSTVE(A/Q)ALEMGLTTLKFFPAEASG | |
| NO: 36 | | GISMVKSLVGPYGDIRLMPTGGITP(S/D)NIDNYLAIPQVLACGGTWMVDK | |
| | | KLV(T/R)NGEWDEIARLTREIVEQVNP | |
| I53-47A | trimer | PIFTLNTNIKA(T/D)DVPSDFLSLTSRLVGLILS(K/E)PGSYVAVHINTD | |
| genus | | QQLSFGGSTNPAAFGTLMSIGGIEP(S/D)KN(R/E)DHSAVLFDHLNAMLG | |
| SEQ ID | | IPKNRMYIHFV(N/D)L(N/D)GDDVGWNGTTF | |
| NO: 37 | | | |
| I53-47B | pentamer | NQHSHKD(Y/H)ETVRIAVVRARWHADIVDACVEAFEIAMAAIGGDRFAVDV | |
| genus | | FDVPGAYEIPLHARTLAETGRYGAVLGTAFVV(N/D)GGIY(R/D)HEFVAS | |
| SEQ ID | | AVIDGMMNVQL(S/D)TGVPVLSAVLTPH(R/E)Y(R/E)DS(A/D)E(H/D) | |
| NO: 38 | | H(R/E)FFAAHFAVKGVEAARACIEIL(A/N)AREKIAA | |
| I53-50A | trimer | EELFKKHKIVAVLRANSVEEAIEKAVAVFAGGVHLIEITFTVPDADTVIKAL | |
| genus | | SVLKEKGAIIGAGTVTSVEQCRKAVESGAEFIVSPHLDEEISQFCKEKGVFY | |
| SEQ ID | | MPGVMTPTELVKAMKLGH(T/D)ILKLFPGEVVGP(Q/E)FV(K/E)AMKGP | |
| NO: 39 | | FPNVKFVPTGGV(N/D)LD(N/D)VC(E/K)WF(K/D)AGVLAVGVG(S/K/ | |
| | | D)ALV(K/E)G(T/D/K)PDEVRE(K/D)AK(A/E/K)FV(E/K)(K/E)IR | |
| | | GCTE | |
| I53-50B | pentamer | NQHSHKD(Y/H)ETVRIAVVRARWHAEIVDACVSAFEAAM(A/R)DIGGDRF | |
| genus | | AVDVFDVPGAYEIPLHARTLAETGRYGAVLGTAFW(N/D)GGIY(R/D)HE | |
| SEQ ID | | FVASAVI(D/N)GMMNVQL(S/D/N)TGVPVLSAVLTPH(R/E/N)Y(R/D/ | |
| NO: 40 | | E)(D/K)S(D/K)A(H/D)TLLFLALFAVKGMEAARACVEILAAREKIAA | |
| T32-28A | dimer | GEVPIGDPKELNGMEIAAVYLQPIEMEPRGIDLAASLADIHLEADIHALKNN | |
| SEQ ID | | PNGFPEGFWMPYLTIAYALANADTGAIKTGTLMPMVADDGPHYGANIAMEKD | |
| NO: 41 | | KKGGFGVGTYALTFLISNPEKQGFGRHVDEETGVGKWFEPFVVTYFFKYTGT | |
| | | PK | |
| T32-28B | trimer | SQAIGILELTSIAKGMELGDAMLKSANVDLLVSKTISPGKFLLMLGGDIGAI | |
| SEQ ID | | QQAIETGTSQAGEMLVDSLVLANIHPSVLPAISGLNSVDKRQAVGIVETWSV | |
| NO: 42 | | AACISAADLAVKGSNVTLVRVHMAFGIGGKCYMVVAGDVLDVAAAVATASLA | |
| | | AGAKGLLVYASIIPRPHEAMWRQMVEG | |
| T33-09A | trimer | EEVVLITVPSALVAVKIAHALVEERLAACVNIVPGLTSIYRWQGSVVSDHEL | |
| SEQ ID | | LLLVKTTTHAFPKLKERVKALHPYTVPEIVALPIAEGNREYLDWLRENTG | |
| NO: 43 | | | |
| T33-09B | trimer | VRGIRGAITVEEDTPAAILAATIELLLKMLEANGIQSYEELAAVIFTVTEDL | |
| SEQ ID | | TSAFPAEAARLIGMHRVPLLSAREVPVPGSLPRVIRVLALWNTDTPQDRVRH | |
| NO: 44 | | VYLNEAVRLRPDLESAQ | |
| T33-15A | trimer | SKAKIGIVTVSDRASAGITADISGKAIILALNLYLTSEWEPIYQVIPDEQDV | |
| SEQ ID | | IETTLIKMADEQDCCLIVTTGGTGPAKRDVTPEATEAVCDRMMPGFGELMRA | |
| NO: 45 | | ESLKEVPTAILSRQTAGLRGDSLIVNLPGDPASISDCLLAVFPAIPYCIDLM | |
| | | EGPYLECNEAMIKPFRPKAK | |
| T33-15B | trimer | VRGIRGAITVNSDTPTSIIIATILLLEKMLEANGIQSYEELAAVIFTVTEDL | |
| SEQ ID | | TSAFPAEAARQIGMHRVPLLSAREVPVPGSLPRVIRVLALWNTDTPQDRVRH | |
| NO: 46 | | VYLSEAVRLRPDLESAQ | |
| T33-21A | trimer | RITTKVGDKGSTRLFGGEEVWKDSPIIEANGTLDELTSFIGEAKHYVDEEMK | |
| SEQ ID | | GILEEIQNDIYKIMGEIGSKGKIEGISEERIAWLLKLILRYMEMVNLKSFVL | |
| NO: 47 | | PGGTLESAKLDVCRTIARRALRKVLTVTREFGIGAEAAAYLLALSDLLFLLA | |
| | | RVIEIEKNKLKEVRS | |
| T33-21B | trimer | PHLVIEATANLRLETSPGELLEQANKALFASGQFGEADIKSRFVTLEAYRQG | |
| SEQ ID | | TAAVERAYLHACLSILDGRDIATRTLLGASLCAVLAEAVAGGGEEGVQVSVE | |
| NO: 48 | | VREMERLSYAKRVVARQR | |
| T33-28A | trimer | ESVNTSFLSPSLVTIRDFDNGQFAVLRIGRTGFPADKGDIDLCLDKMIGVRA | |
| SEQ ID | | AQIFLGDDTEDGFKGPHIRIRCVDIDDKHTYNAMVYVDLIVGTGASEVERET | |
| NO: 49 | | AEEEAKLALRVALQVDIADEHSCVTQFEMKLREELLSSDSFHPDKDEYYKDF | |
| | | L | |
| T33-28B | trimer | PVIQTFVSTPLDHHKRLLLAIIYRIVTRVVLGKPEDLVMMTFHDSTPMHFFG | |
| SEQ ID | | STDPVACVRVEALGGYGPSEPEKVTSIVTAAITAVCGIVADRIFVLYFSPLH | |
| NO: 50 | | CGWNGTNF | |
| T33-31A | trimer | EEVVLITVPSALVAVKIAHALVEERLAACVNIVPGLTSIYREEGSVVSDHEL | |
| SEQ ID | | LLLVKTTTDAFPKLKERVKELHPYEVPEIVALPIAEGNREYLDWLRENTG | |
| NO: 51 | | | |

TABLE 2

| | | | isoelectric | percent |
|---|---|---|---|---|
| name | MW | Oligomer MW | point | hydrophobic(“ILVMFW”) |
| I53-34A | 21427 | 64281 | 5.82 | 0.33 |
| I53-34B | 17083 | 85414 | 6.1 | 0.31 |
| I53-40A | 17091 | 85455 | 6.85 | 0.32 |
| I53-40B | 21789 | 65367 | 4.91 | 0.34 |
| I53-47A | 12191 | 36572 | 6.47 | 0.34 |
| I53-47B | 16956 | 84781 | 6.31 | 0.31 |
| I53-50A | 21783 | 65350 | 6.91 | 0.35 |
| I53-50B | 16839 | 84195 | 5.95 | 0.32 |
| I53-51A | 19967 | 59900 | 8.74 | 0.34 |
| I53-51B | 17178 | 85892 | 6.31 | 0.3 |
| I52-03A | 21026 | 105129 | 6.16 | 0.31 |
| I52-03B | 25875 | 51749 | 5.32 | 0.3 |
| I52-32A | 15015 | 30029 | 5.43 | 0.42 |
| I52-32B | 16877 | 84383 | 6.58 | 0.35 |
| I52-33A | 17914 | 89569 | 7.17 | 0.36 |
| I52-33B | 19215 | 38430 | 7.12 | 0.37 |
| I32-06A | 21632 | 43263 | 6.78 | 0.3 |
| I32-06B | 14736 | 44208 | 6.48 | 0.34 |
| I32-19A | 25405 | 76214 | 7.86 | 0.3 |
| I32-19B | 17186 | 34373 | 6.57 | 0.24 |
| I32-28A | 16648 | 49944 | 5.23 | 0.32 |
| I32-28B | 16173 | 32347 | 4.76 | 0.31 |
| I53-40A.1 | 17148 | 85740 | 7.66 | 0.32 |
| I53-40B.1 | 22070 | 66211 | 4.74 | 0.34 |
| I53-47A.1 | 12233 | 36698 | 5.65 | 0.34 |
| I53-47A.1NegT2 | 12209 | 36626 | 4.4 | 0.34 |
| I53-47B.1 | 17045 | 85226 | 6.04 | 0.31 |
| I53-47B.1NegT2 | 16902 | 84509 | 4.75 | 0.31 |
| I53-50A.1 | 21765 | 65296 | 6.17 | 0.35 |
| I53-50A.1NegT2 | 21746 | 65237 | 4.62 | 0.35 |
| I53-50A.1PosT1 | 21790 | 65369 | 9.07 | 0.35 |
| I53-50B.1 | 16926 | 84631 | 6.04 | 0.32 |
| I53-50B.1NegT2 | 16810 | 84049 | 4.8 | 0.32 |
| I53-50B.4PosT1 | 16867 | 50602 | 6.77 | 0.32 |
| I53-40A genus | 17091 | 85455 | 6.85 | 0.32 |
| I53-40B genus | 21789 | 65367 | 4.91 | 0.34 |
| I53-47A genus | 12191 | 36572 | 6.47 | 0.34 |
| I53-47B genus | 16956 | 84781 | 6.31 | 0.31 |
| I53-50A genus | 21652 | 64956 | 7.15 | 0.35 |
| I53-50B genus | 16839 | 84195 | 5.95 | 0.32 |
| T32-28A | 17168 | 34337 | 4.79 | 0.29 |
| T32-28B | 18711 | 56132 | 5.52 | 0.36 |
| T33-09A | 11321 | 33963 | 6.08 | 0.36 |
| T33-09B | 13279 | 39838 | 5.14 | 0.34 |
| T33-15A | 18902 | 56705 | 4.53 | 0.3 |
| T33-15B | 13298 | 39895 | 5.65 | 0.34 |
| T33-21A | 19158 | 57474 | 6.04 | 0.35 |
| T33-21B | 13128 | 39383 | 5.73 | 0.28 |
| T33-28A | 17637 | 52910 | 4.5 | 0.31 |
| T33-28B | 12302 | 36907 | 6.59 | 0.38 |
| T33-31A | 11329 | 33987 | 4.88 | 0.35 |
| T33_dn2A | 13632 | 40896 | 4.7 | 0.19 |
| T33_dn2B | 13687 | 41061 | 5.57 | 0.19 |
| T33_dn5A | 13528 | 40583 | 4.07 | 0.19 |
| T33_dn5A | 19741 | 59222 | 5.45 | 0.29 |
| T33_dn10A | 13883 | 41649 | 4.26 | 0.2 |
| T33_dn10B | 30222 | 90666 | 6.31 | 0.3 |
| 153_dn5A | 17004 | 85019 | 7.14 | 0.35 |
| 153_dn5B | 14138 | 70688 | 4.94 | 0.19 |

[0175] Tables 1 and 2 provides the amino acid sequence of the compA and compBs of embodiments of the present disclosure. In each case, the pairs of sequences together form an I53 multimer with icosahedral symmetry. The right-hand column in Table 1 identifies the residue numbers in each exemplary polypeptide that were identified as present at the interface of resulting assembled virus-like particles (i.e.: “identified interface residues”). As can be seen, the number of interface residues for the exemplary polypeptides of SEQ ID NO:1-34 range from 4-13. In some embodiments, compA and compB have 4, 5, 6, 7, 8, 9, 10, 11, 12, or 13 interface residues. In various embodiments, the compA and compB proteins comprise an amino acid sequence that is at least 75%, 80%, 85%, 90%, 91%, 92%, 93%, 94%, 95%, 96%, 97%, 98%, or 99% identical over its length, and identical to at least 1, 2, 3, 4, 5, 6, 7, 8, 9, 10, 11, 12, or 13 identified interface positions (depending on the number of interface residues for a given polypeptide), to the amino acid sequence of a polypeptide selected from the group consisting of SEQ ID NOS: 1-34. SEQ ID NOs: 35-51 represent other amino acid sequences of the compA and compBs from embodiments of the present disclosure. In other embodiments, the compA and/or compBs comprise an amino acid sequence that is at least 75%, 80%, 85%, 90%, 91%, 92%, 93%, 94%, 95%, 96%, 97%, 98%, or 99% identical over its length, and identical at least at 20%, 25%, 33%, 40%, 50%, 60%, 70%, 75%, 80%, 90%, or 100% of the identified interface positions, to the amino acid sequence of a polypeptide selected from the group consisting of SEQ ID NOS:1-51.

[0176] As shown in Table 2, the compA and compB proteins have similar molecular weights (MW), isoelectric points (pI) and percent hydrophobic residues, suggesting they can be expressed and purified using similar methods.

[0177] As is the case with proteins in general, the polypeptides are expected to tolerate some variation in the designed sequences without disrupting subsequent assembly into virus-like particles: particularly when such variation comprises conservative amino acid substitutions. As used here, “conservative amino acid substitution” means that: hydrophobic amino acids (Ala, Cys, Gly, Pro, Met, Val, Ile, Leu) can only be substituted with other hydrophobic amino acids; hydrophobic amino acids with bulky side chains (Phe, Tyr, Trp) can only be substituted with other hydrophobic amino acids with bulky side chains; amino acids with positively charged side chains (Arg, His, Lys) can only be substituted with other amino acids with positively charged side chains; amino acids with negatively charged side chains (Asp, Glu) can only be substituted with other amino acids with negatively charged side chains; and amino acids with polar uncharged side chains (Ser, Thr, Asn, Gln) can only be substituted with other amino acids with polar uncharged side chains.

[0178] In various embodiments of the pbVLPs of the invention, the compA and compBs, or the vice versa, comprise polypeptides with the amino acid sequence selected from the following pairs, or modified versions thereof (i.e., permissible modifications as disclosed for the polypeptides of the invention: isolated polypeptides comprising an amino acid sequence that is at least 75%, at least 80%, at least 85%, at least 90%, at least 95%, at least 99%, at least 100% over its length, and/or identical at least at one identified interface position, to the amino acid sequence indicated by the SEQ ID NO):
[0179] SEQ ID NO:1 and SEQ ID NO:2 (I53-34A and I53-34B);
[0180] SEQ ID NO:3 and SEQ ID NO:4 (I53-40A and I53-40B);
[0181] SEQ ID NO:3 and SEQ ID NO:24 (I53-40A and I53-40B.1);
[0182] SEQ ID NO:23 and SEQ ID NO:4 (I53-40A.1 and I53-40B);
[0183] SEQ ID NO:35 and SEQ ID NO:36 (I53-40A genus and I53-40B genus);
[0184] SEQ ID NO:5 and SEQ ID NO:6 (I53-47A and I53-47B);
[0185] SEQ ID NO:5 and SEQ ID NO:27 (I53-47A and I53-47B.1);
[0186] SEQ ID NO:5 and SEQ ID NO:28 (I53-47A and I53-47B.1NegT2);
[0187] SEQ ID NO:25 and SEQ ID NO:6 (I53-47A.1 and I53-47B);
[0188] SEQ ID NO:25 and SEQ ID NO:27 (I53-47A.1 and 153-47B.1);
[0189] SEQ ID NO:25 and SEQ ID NO:28 (I53-47A.1 and I53-47B.1NegT2);
[0190] SEQ ID NO:26 and SEQ ID NO:6 (I53-47A.1NegT2 and I53-47B);
[0191] SEQ ID NO:26 and SEQ ID NO:27 (I53-47A.1NegT2 and I53-47B.1);
[0192] SEQ ID NO:26 and SEQ ID NO:28 (I53-47A.1NegT2 and I53-47B.1NegT2);
[0193] SEQ ID NO:37 and SEQ ID NO:38 (I53-47A genus and I53-47B genus);
[0194] SEQ ID NO:7 and SEQ ID NO:8 (I53-50A and 153-50B);
[0195] SEQ ID NO:7 and SEQ ID NO:32 (I53-50A and I53-50B.1);
[0196] SEQ ID NO:7 and SEQ ID NO:33 (I53-50A and I53-50B.1NegT2);
[0197] SEQ ID NO:7 and SEQ ID NO:34 (I53-50A and I53-50B.4PosT1);
[0198] SEQ ID NO:29 and SEQ ID NO:8 (I53-50A.1 and 153-50B);
[0199] SEQ ID NO:29 and SEQ ID NO:32 (I53-50A.1 and 153-50B.1);
[0200] SEQ ID NO:29 and SEQ ID NO:33 (I53-50A.1 and I53-50B.1NegT2);
[0201] SEQ ID NO:29 and SEQ ID NO:34 (I53-50A.1 and I53-50B.4PosT1);
[0202] SEQ ID NO:30 and SEQ ID NO:8 (I53-50A.1NegT2 and 153-50B);
[0203] SEQ ID NO:30 and SEQ ID NO:32 (I53-50A.1NegT2 and 153-50B.1);
[0204] SEQ ID NO:30 and SEQ ID NO:33 (I53-50A.1NegT2 and I53-50B.1NegT2);
[0205] SEQ ID NO:30 and SEQ ID NO:34 (I53-50A.1NegT2 and I53-50B.4PosT1);
[0206] SEQ ID NO:31 and SEQ ID NO:8 (I53-50A.1PosT1 and 153-50B);
[0207] SEQ ID NO:31 and SEQ ID NO:32 (I53-50A.1PosT1 and 153-50B.1);
[0208] SEQ ID NO:31 and SEQ ID NO:33 (I53-50A.1PosT1 and I53-50B.1NegT2);
[0209] SEQ ID NO:31 and SEQ ID NO:34 (I53-50A.1PosT1 and I53-50B.4PosT1);
[0210] SEQ ID NO:39 and SEQ ID NO:40 (I53-50A genus and I53-50B genus);
[0211] SEQ ID NO:9 and SEQ ID NO:10 (I53-51A and I53-51B);
[0212] SEQ ID NO:11 and SEQ ID NO:12 (I52-03A and I52-03B);
[0213] SEQ ID NO:13 and SEQ ID NO:14 (I52-32A and I52-32B);
[0214] SEQ ID NO:15 and SEQ ID NO:16 (I52-33A and I52-33B)
[0215] SEQ ID NO:17 and SEQ ID NO:18 (I32-06A and I32-06B);
[0216] SEQ ID NO:19 and SEQ ID NO:20 (I32-19A and I32-19B);
[0217] SEQ ID NO:21 and SEQ ID NO:22 (I32-28A and I32-28B);
[0218] SEQ ID NO:23 and SEQ ID NO:24 (I53-40A.1 and I53-40B.1);
[0219] SEQ ID NO:41 and SEQ ID NO:42 (T32-28A and T32-28B);
[0220] SEQ ID NO:43 and SEQ ID NO:44 (T33-09A and T33-09B);
[0221] SEQ ID NO:45 and SEQ ID NO:46 (T33-15A and T33-15B);
[0222] SEQ ID NO:47 and SEQ ID NO:48 (T33-21A and T33-21B);
[0223] SEQ ID NO:49 and SEQ ID NO:50 (T33-28A and T32-28B); and
[0224] SEQ ID NO:51 and SEQ ID NO:44 (T33-31A and T33-09B (also referred to as T33-31B)), wherein those ending in “A” are compA and those ending in “B” are compB (e.g. 153-34A is compA and I53-34B is compB).

[0225] Non-limiting examples of designed protein complexes useful in protein-based VLPs of the present disclosure include those disclosed in U.S. Pat. No. 9,630,994; Int'l Pat. Pub No. WO2018187325A1; U.S. Pat. Pub. No. 2018/0137234 A1; U.S. Pat. Pub. No. 2019/0155988 A2, each of which is incorporated herein in its entirety.

[0226] In some embodiments, the disclosure provides pbVLPs comprising (i) a fusion protein of compA linked to an antigenic protein or antigenic fragment thereof and (ii) compB prepared according to a method described herein. The term “antigenic fragment” refers to any fragment of a protein that generates an immune response (humoral or T cell response) to the protein in vivo. The antigenic fragment may be a linear epitope, discontinuous epitope, or a conformation epitope (e.g., a folded domain). The antigenic fragment may preserve the secondary, tertiary, and/or quaternary structure of the full-length protein. In some embodiments, the antigenic fragment comprises a neutralizing epitope. In such cases, the VLP may generate a neutralizing antibody response. Antigenic fragments may be designed computationally, such as by predicting the secondary structure and rationally removing N- or C-terminal unstructured regions or internally loops, or entire structural elements (alpha helices and/or beta sheets).

[0227] In some embodiments, the antigenic protein is selected from HIV Env, RSV F, EBV gp350, CMV gB, CMV UL128, CMV UL130, CMV UL131A, CMV gH, CMV gL, Lyme OspA, Pertussis toxin, Dengue E, SARS S, MERS S, Zaire ebolavirus GP, Sudan ebolavirus GP, Marburg virus GP, Hanta virus Gn, Hanta virus Gc, HepB surface antigen, Measles H, Zika envelope domain III, Malaria CSP, Malaria Pfs25, Nipah virus F, Nipah virus G, Rotavirus VP4, Rotavirus VP8*, hMPV F, hMPV G, PV F, PV HN, MenB fHbp, MenB NadA, coronavirus S protein, coronavirus RBD, and MenB NHBA. In some embodiments, the antigenic protein is a paramyxovirus and/or pneumovirus F protein, or antigenic fragment thereof. Exemplary paramyxovirus and/or pneumovirus include, but are not limited to, respiratory syncytial virus (RSV) and Human metapneumovirus (hMPV). (C. L. Afonso et al., Taxonomy of the order Mononegavirales: update 2016. Arch. Virol. 161, 2351-2360 (2016)).

[0228] In some embodiments, the antigenic protein comprises an amino acid sequence having at least 75%, 80%, 85%, 90%, 91%, 92%, 93%, 94%, 95%, 96%, 97%, 98%, 99%, or 100% identity to an amino acid sequence selected from SEQ ID NOs: 64-136 and 206-209. In some embodiments, the antigenic protein comprises a signal peptide that is cleaved during processing. In some embodiments, the signal peptide comprises an amino acids sequence set forth by SEQ ID NOs: 210-212.

[0229] In some embodiments, the fusion protein comprises a linker positioned between the compA protein and the antigenic protein. In some embodiment, the fusion protein comprises an amino acid linker positioned between the compA protein and the antigenic protein. In some embodiments, the amino acid linker is a Gly-Ser linker (i.e.: a linker consisting of glycine and serine residues) of any suitable length. In some embodiments, the Gly-Ser linker is 3, 4, 5, 6, 7, 8, 9, 10, 11, 12, 13, 14, 15, 16, 17, 18, 19, 20, or more amino acids in length. In some embodiments, the Gly-Ser linker comprises or consists of an amino acid sequence selected from SEQ ID NOs: 213-215.

[0230] In some embodiments, the fusion protein comprises an amino acid sequence having at least 75%, 80%, 85%, 90%, 91%, 92%, 93%, 94%, 95%, 96%, 97%, 98%, 99%, or 100% identity to an amino acid sequence selected from SEQ ID NOs: 61 and 167-193. In some embodiments, the fusion protein comprises an amino acid sequence having at least 75%, 80%, 85%, 90%, 91%, 92%, 93%, 94%, 95%, 96%, 97%, 98%, 99%, or 100% identity to an amino acid sequence selected from SEQ ID NOs: 137-166 and 194-199. In some embodiments, the fusion protein comprises an amino acid sequence having at least 75%, 80%, 85%, 90%, 91%, 92%, 93%, 94%, 95%, 96%, 97%, 98%, 99%, or 100% identity to an amino acid sequence selected from SEQ ID NOs: 200-205.

[0231] Table 3 provides illustrative sequences for fusion proteins comprising a CompA component linked to an antigenic protein derived from human metapneumovirus (hMPV) or respiratory syncytial virus (RSV).

TABLE 3
Amino acid sequences for exemplary VLP components

| Name/ | | SEQ |
|---|---|---|
| Identifier | Sequence | ID NO |
| CompA- | KESYLEESCSTITEGYLSVLRTGWYTNVFTLEVGDVENLTCSD | 60 |
| hMPV-his | GPSLIKTELDLTKSALRELKTVSADQLAREEQIENPRQSRFVLG | |
| | AIALGVATAAAVTAGVAIAKTIRLESEVTAIKNALKTTNEAVS | |
| | TLGNGVRVLATAVRELKDFVSKNLTRAINKNKCDIDDLKMA | |
| | VSFSQFNRRFLNVVRQFSDNAGITPAISLDLMTDAELARAVSN | |
| | MPTSAGQIKLMLENRAMVRRKGFGILIGVYGSSVIYMVQLPIF | |
| | GVIDTPCWIVKAAPSCSEKKGNYACLLREDQGWYCQNAGST | |
| | VYYPNEKDCETRGDHVFCDTAAGINVAEQSKECNINISTTNYP | |
| | CKVSTGRHPISMVALSPLGALVACYKGVSCSIGSNRVGIIKQL | |
| | NKGCSYITNQDADTVTIDNTVYQLSKVEGEQHVIKGRPVSSSF | |
| | DPIKFPEDQFNVALDQVFENIENSQAGSGGSGSGSGGSEKAAK | |
| | AEEAARKMEELFKKHKIVAVLRANSVEEAIEKAVAVFAGGV | |
| | HLIEITFTVPDADTVIKALSVLKEKGAIIGAGTVTSVEQARKAV | |
| | ESGAEFIVSPHLDEEISQFAKEKGVFYMPGVMTPTELVKAMK | |
| | LGHTILKLFPGEVVGPQFVKAMKGPFPNVKFVPTGGVNLDNV | |
| | AEWFKAGVLAVGVGSALVKGTPDEVREKAKAFVEKIRGATE | |
| | LE | |
| CompA- | MELLILKANAITTILTAVTFCFASGQNITEEFYQSTCSAVSKGY | 61 |
| RSV-02 | LSALRTGWYTSVITIELSNIKENKCNGTDAKVKLIKQELDKYK | |
| | NAVTELQLLMQSTPATNNRARRELPRFMNYTLNNAKKTNVT | |
| | LSKKRKRRFLGFLLGVGSAIASGVAVCKVLHLEGEVNKIKSA | |
| | LLSTNKAVVSLSNGVSVLTFKVLDLKNYIDKQLLPILNKQSCS | |
| | ISNIETVIEFQQKNNRLLEITREFSVNAGVTTPVSTYMLTNSEL | |
| | LSLINDMPITNDQKKLMSNNVQIVRQQSYSIMCIIKEEVLAYV | |
| | VQLPLYGVIDTPCWKLHTSPLCTTNTKEGSNICLTRTDRGWY | |
| | CDNAGSVSFFPQAETCKVQSNRVFCDTMNSLTLPSEVNLCNV | |
| | DIFNPKYDCKIMTSKTDVSSSVITSLGAIVSCYGKTKCTASNK | |
| | NRGIIKTFSNGCDYVSNKGVDTVSVGNTLYYVNKQEGKSLYV | |
| | KGEPIINFYDPLVFPSDEFDASISQVNEKINQSLAFIRKSDELLG | |
| | SGGSGSGSGGSEKAAKAEEAARKMEELFKKHKIVAVLRANS | |
| | VEEAIEKAVAVFAGGVHLIEITFTVPDADTVIKALSVLKEKGAI | |
| | IGAGTVTSVEQCRKAVESGAEFIVSPHLDEEISQFCKEKGVFY | |
| | MPGVMTPTELVKAMKLGHTILKLFPGEVVGPQFVKAMKGPF | |
| | PNVKFVPTGGVNLDNVCEWFKAGVLAVGVGSALVKGTPDE | |
| | VREKAKAFVEKIRGCTE | |
| CompB-01 | MNQHSHKDHETVRIAVVRARWHAEIVDACVSAFEAAMRDIG | 63 |
| | GDRFAVDVFDVPGAYEIPLHARTLAETGRYGAVLGTAFVVN | |
| | GGIYRHEFVASAVINGMMNVQLNTGVPVLSAVLTPHNYDKS | |
| | KAHTLLFLALFAVKGMEAARACVEILAAREKIAA | |

[0232] In various embodiments of the pbVLPs of the disclosure, the compA and compB proteins comprise polypeptides with the amino acid sequence selected from the following pairs, or modified versions thereof (i.e., permissible modifications as disclosed for the polypeptides of the invention: isolated polypeptides comprising an amino acid sequence that is at least 75%, at least 80%, at least 85%, at least 90%, at least 95%, at least 99%, at least 100% over its length, and/or identical at least at one identified interface position, to the amino acid sequence indicated by the SEQ ID NO):
[0233] SEQ ID NO:52 and SEQ ID NO:53 (T33_dn2A and T33_dn2B);
[0234] SEQ ID NO:54 and SEQ ID NO:55 (T33_dn5A and T33_dn5B);
[0235] SEQ ID NO:56 and SEQ ID NO:57 (T33_dn10A and T33_dn10B); or
[0236] SEQ ID NO:58 and SEQ ID NO:59 (153 dn5A and 153 dn5B),
   wherein those ending in “dn5B” are compA and those ending in “dn5A” are compB (e.g. I53_dn5B is compA and dn5A is compB).

T33_dn2A
(SEQ ID NO: 52)
NLAEKMYKAGNAMYRKGQYTIAIIAYTLALLKDPNNAEAWYNLGNAAYKK
GEYDEAIEAYQKALELDPNNAEAWYNLGNAYYKQGDYDEAIEYYKKALRL
DPRNVDAIENLIEAEEKQG
T33_dn2B
(SEQ ID NO: 53)
EEAELAYLLGELAYKLGEYRIAIRAYRIALKRDPNNAEAWYNLGNAYYKQ
GDYREAIRYYLRALKLDPENAEAWYNLGNALYKQGKYDLAIIAYQAALEE
DPNNAEAKQNLGNAKQKQG
T33_dn5A
(SEQ ID NO: 54)
NSAEAMYKMGNAAYKQGDYILAIIAYLLALEKDPNNAEAWYNLGNAAYKQ
GDYDEAIEYYQKALELDPNNAEAWYNLGNAYYKQGDYDEAIEYYEKALEL
DPNNAEALKNLLEAIAEQD
T33_dn5B
(SEQ ID NO: 55)
TDPLAVILYIAILKAEKSIARAKAAEALGKIGDERAVEPLIKALKDEDAL
VRAAAADALGQIGDERAVEPLIKALKDEEGLVRASAAIALGQIGDERAVQ
PLIKALTDERDLVRVAAAVALGRIGDEKAVRPLIIVLKDEEGEVREAAAI
ALGSIGGERVRAAMEKLAERGTGFARKVAVNYLETHK
T33_dn10A
(SEQ ID NO: 56)
EEAELAYLLGELAYKLGEYRIAIRAYRIALKRDPNNAEAWYNLGNAYYKQ
GDYDEAIEYYQKALELDPNNAEAWYNLGNAYYKQGDYDEAIEYYEKALEL
DPENLEALQNLLNAMDKQG
T33_dn10B
(SEQ ID NO: 57)
IEEVVAEMIDILAESSKKSIEELARAADNKTTEKAVAEAIEEIARLATAA
IQLIEALAKNLASEEFMARAISAIAELAKKAIEAIYRLADNHTTDTFMAR
AIAAIANLAVTAILAIAALASNHTTEEFMARAISAIAELAKKAIEAIYRL
ADNHTTDKFMAAAIEAIALLATLAILAIALLASNHTTEKFMARAIMAIAI
LAAKAIEAIYRLADNHTSPTYIEKAIEAIEKIARKAIKAIEMLAKNITTE
EYKEKAKKIIDIIRKLAKMAIKKLEDNRT
I53_dn5A
(SEQ ID NO: 58)
KYDGSKLRIGILHARWNAEIILALVLGALKRLQEFGVKRENIIIETVPGS
FELPYGSKLFVEKQKRLGKPLDAIIPIGVLIKGSTMHFEYICDSTTHQLM
KLNFELGIPVIFGVLTCLTDEQAEARAGLIEGKMHNHGEDWGAAAVEMAT
KFN
I53_dn5B
(SEQ ID NO: 59)
EEAELAYLLGELAYKLGEYRIAIRAYRIALKRDPNNAEAWYNLGNAYYKQ
GRYREAIEYYQKALELDPNNAEAWYNLGNAYYERGEYEEAIEYYRKALRL
DPNNADAMQNLLNAKMREE

Assembly of pbVLPs

[0237] In some embodiments, a single component self-assembles into the pbVLP. In some embodiments, the single component is compA. In some embodiments, one or more purified samples of first and second components for use in forming a pbVLP are mixed in an approximately equimolar molar ratio in aqueous conditions (e.g., an I53-50A/B icosahedral pbVLP). In some embodiments, the first and second components are compA and compB respectively. The first and second components (through the multimerization domains and optionally through the ectodomains) interact with one another to drive assembly of the target pbVLP. Successful assembly of the target pbVLP can be confirmed by analyzing the in vitro assembly reaction by common biochemical or biophysical methods used to assess the physical size of proteins or protein assemblies, including but not limited to size exclusion chromatography, native (non-denaturing) gel electrophoresis, dynamic light scattering, multi-angle light scattering, analytical ultracentrifugation, negative stain electron microscopy, cryo-electron microscopy, or X-ray crystallography. If necessary, the assembled pbVLP can be purified from other species or molecules present in the in vitro assembly reaction using preparative techniques commonly used to isolate proteins by their physical size, including but not limited to size exclusion chromatography, preparative ultracentrifugation, tangential flow filtration, or preparative gel electrophoresis. The presence of the antigenic protein in the pbVLP can be assessed by techniques commonly used to determine the identity of protein molecules in aqueous solutions, including but not limited to SDS-PAGE, mass spectrometry, protein sequencing, ELISA, surface plasmon resonance, biolayer interferometry, or amino acid analysis. The accessibility of the protein on the exterior of the particle, as well as its conformation or antigenicity, can be assessed by techniques commonly used to detect the presence and conformation of an antigen, including but not limited to binding by monoclonal antibodies, conformation-specific monoclonal antibodies, surface plasmon resonance, biolayer interferometry, or antisera specific to the antigen.

[0238] In various embodiments, the pbVLPs of the disclosure comprise two or more distinct compAs bearing different antigenic proteins as genetic fusions; these pbVLPs co-display multiple different proteins on the same pbVLP. These multi-antigen pbVLPs are produced by performing in vitro assembly with mixtures of two or more antigens each comprising a multimerization domain. The fraction of each antigen in the mixture determines the average valency of each antigenic protein in the resulting pbVLPs. The presence and average valency of each antigen in a given sample can be assessed by quantitative analysis using the techniques described above for evaluating the presence of antigenic proteins in full-valency pbVLPs.

[0239] In various embodiments, the pbVLPs are between about 20 nanometers (nm) to about 40 nm in diameter, with interior lumens between about 15 nm to about 32 nm across and pore sizes in the protein shells between about 1 nm to about 14 nm in their longest dimensions.

[0240] In some embodiments, the pbVLPs has icosahedral symmetry. In such embodiment, the pbVLP may comprise 60 copies of a first component and 60 copies of a second component. In one such embodiment, the number of identical compAs in each first assembly is different than the number of identical compAs in each second assembly. For example, in some embodiments, the pbVLP comprises twelve first assemblies and twenty second assemblies; in such embodiments, each first assembly may, for example, comprise five copies of the identical first component, and each second assembly may, for example, comprise three copies of the identical second component. In other embodiments, the pbVLP comprises twelve first assemblies and thirty second assemblies; in such an embodiment, each first assembly may, for example, comprise five copies of the identical first component, and each second assembly may, for example, comprise two copies of the identical second component. In further embodiments, the pbVLP comprises twenty first assemblies and thirty second assemblies; in this embodiment, each first assembly may, for example, comprise three copies of the identical first component, and each second assembly may, for example, comprise two copies of the identical second component. All of these embodiments are capable of forming protein-based VLPs with regular icosahedral symmetry.

[0241] In various further embodiments, oligomeric states of the first and second multimerization domains are as follows:
[0242] I53-34A: trimer+I53-34B: pentamer;
[0243] I53-40A: pentamer+I53-40B: trimer;
[0244] I53-47A: trimer+I53-47B: pentamer;
[0245] I53-50A: trimer+I53-50B: pentamer;
[0246] I53-51A: trimer+I53-51B: pentamer;
[0247] I32-06A: dimer+I32-06B: trimer;
[0248] I32-19A: trimer+I32-19B: dimer;
[0249] I32-28A: trimer+I32-28B: dimer;
[0250] I52-03A: pentamer+I52-03B: dimer;
[0251] I52-32A: dimer+I52-32B: pentamer; and
[0252] I52-33A: pentamer+I52-33B: dimer

### Methods of Making Nanostructures

[0253] The present disclosure provides methods of combining one or more proteins (e.g., compA and/or compB) under conditions that yield formation of protein nanostructures. In some embodiments, the method comprises addition of a first protein (e.g., compA) to a solution comprising a second protein (e.g., compB), wherein the addition provides a partially or substantially homogenous solution of the first and second proteins, i.e., having consistent or uniform physical composition throughout the solution, and wherein the first and second proteins assemble to form nanostructures. Mechanical mixing, e.g., with a mixing blade, stir bar, or impeller, is often used to mix miscible liquids. However, as described herein, it was found the addition of compA to a solution of compB using mechanical mixing resulted in a composition of pbVLPs having substantial turbidity due to precipitation of compA and/or compB. In contrast, it was discovered that the addition of compA to a solution of compB under conditions that induced blending of compA and compB with minimized shear stress (e.g., addition of compA under the surface of the compB solution and/or additionally without mechanical stirring) resulted in formation of pbVLPs with minimal or limited precipitation of compA and/or compB. Moreover, it was demonstrated that robust, homogenous, and rapid liquid-to-liquid mixing of a solution containing compA and a solution containing compB is achieved using microfluidics mixing, thereby enabling formation of a nanostructure (e.g., pbVLP) comprising compA and compB.

[0254] Accordingly, the present disclosure provides methods for (i) addition of a first protein (e.g., compA) to a solution comprising a second protein (e.g., compB), and (ii) mixing the first protein and second protein under conditions that minimizes shear stress, thereby resulting in formation of a protein nanostructure (e.g., pbVLP). In some embodiments, the method of mixing is any method known in the art suitable for blending, mixing, or combining miscible liquids (e.g., low viscosity liquids) under conditions that minimize shear stress, e.g., as compared to mechanical mixing using a blade, stir bar, or impeller. As described herein, “shear stress” refers to the differences in velocity throughout a fluid, e.g., in a flow vessel subjected to agitation, wherein the greater the velocity differences within the fluid, the greater the degree of shear stress. Methods for measuring shear stress in a fluid are known in the art, and include, e.g., laser doppler velocimetry.

[0255] In some embodiments, the method of mixing, blending, or combining the first protein (e.g., compA) and the second protein (e.g., compB) under conditions that minimize shear stress provides a suspension of protein nanostructures (e.g., pbVLPs) having reduced turbidity as compared to mixing of the first and second protein by mechanical mixing e.g., using a blade, stir bar, or impeller. Methods of measuring turbidity using optical measurements or optical scattering measurements are known in the art. In some embodiments, the conditions that minimize shear stress result in formation of protein nanostructures (e.g., pbVLPs) with reduced precipitation of the nanostructure, the first protein (e.g., compA), and/or the second protein (e.g., compB) as compared to mechanical mixing e.g., using a blade, stir bar, or impeller.

[0256] In some embodiments, the conditions that minimize shear stress provide for reduced shear stress as compared to mechanical mixing following the addition of the first protein (e.g., compA) to a solution comprising the second protein (e.g., compB). In some embodiments, the conditions that minimize shear stress comprise mixing the solution without mechanical mixing. In some embodiments, the conditions that minimize shear stress comprise mixing the solution without a stir bar. In some embodiments, the conditions that minimize shear stress comprise mixing without an impeller.

[0257] In some embodiments, the method of mixing, blending, or combining the first protein (e.g., compA) and the second protein (e.g., compB) under conditions that minimize shear stress comprise orbital agitation. In some embodiments, the solution comprising the first and second protein is contained in a vessel that undergoes motion by orbital agitation using an orbital shaking platform. In some embodiments, the motion induced by orbital shaking provides for sufficient bulk mixing of the first protein (e.g., compA) and the second protein (e.g., compB) to form a partially or substantially homogenous mixture of the first protein and the second protein, thereby enabling formation of nanostructures comprising the first protein and the second protein (e.g., pbVLPs). In some embodiments, the containment vessel comprises a working volume exceeding about 100 mL (e.g., 250 mL, 500 mL, 750 mL). In some embodiments, the containment vessel comprises a working volume exceeding about 1 L, 10 L, 50 L, 100 L, 250 L, 500 L, 750 L, or 1000 L. In some embodiments, the orbital agitation is performed at ambient temperature (e.g., about 20-25° C.). In some embodiments, the orbital agitation is performed at an elevated temperature (e.g., about 30-37° C.). In some embodiments, the speed of the orbital agitation is selected to minimize shear stress of the mixing. In some embodiments, the containment vessel is agitated at a speed of about 30-100 rpm. In some embodiments, the containment vessel is agitated at a speed of about 70 rpm. In some embodiments, the containment vessel is agitated at a speed of about 80 rpm. In some embodiments, the containment vessel is agitated at a speed of about 90 rpm.

[0258] In some embodiments, the method of mixing, blending, or combining the first protein (e.g., compA) and the second protein (e.g., compB) under conditions that minimize shear stress comprise providing (i) a first inlet fluid stream, (ii) a second inlet fluid stream, and (iii) an outlet stream, wherein (i), (ii), and (iii) are joined at a branch point in a three-way configuration (e.g., a T-shaped configuration, a Y-shaped configuration), and wherein the fluid stream of (i) and the fluid stream of (ii) are contacted to form the outlet stream of (iii). In some embodiments, the first inlet fluid stream comprises a solution of the first protein (e.g., compA), the second inlet fluid stream comprises a solution of the second protein (e.g., compB). In some embodiments, a mixing, blending, or combining of the first protein and the second protein occurs in the outlet stream. In some embodiments, the mixing, blending, or combining results in formation of a nanostructure comprising the first protein and the second protein (e.g., pbVLP).

[0259] In some embodiments, the mixing, blending, or combining of the first protein (e.g., compA) and the second protein (e.g., compB) in the outlet stream is mediated by a static mixing element. A “static mixing element” or “static mixer” refers to a device inserted into a flow path for the purpose of facilitating mixing by causing the flow stream to divide, recombine, accelerate/decelerate, spread, swirl, or form layers without the use of moving parts. Static mixing devices are known in the art, and typically consist of individual mixing elements (e.g., plates, baffles, helical elements, or geometric grids) positioned at precise angles to direct flow and increase turbulence of the flow stream. Such devices are capable of mixing liquids having comparable or very different viscosities and volumetric flow rates. It is within the knowledge of the skilled person to select a static mixing device having particular mixing elements, cross section of a particular shape and size, and device length to facilitate uniform mixing of two or more inlet fluid streams. Methods to evaluate the quality of the mixing include measuring the radial variation coefficient (CoV), which describes the deviations of local concentration from the mean within a cross section of the flow path, and wherein a lower CoV indicates more uniform mixing. In some embodiments, the static mixing element is selected to achieve a CoV of less than about 0.05 (i.e., 95% of all concentration measurements to be taken from flow path cross section are within ±10%).

[0260] In some embodiments, the solution of the first protein (e.g., compA) is pumped through a first line, e.g., via a pump, to form the first inlet fluid stream. In some embodiments, the solution of the first protein (e.g., compA) is pumped through the first line at a flow rate of at least about 100 mL/min. In some embodiments, the solution of the first protein (e.g., compA) is pumped through the first line at a flow rate of about 100 mL/min, about 200 mL/min, about 300 mL/min, about 400 mL/min, about 500 mL/min, about 600 mL/min, about 700 mL/min, about 800 mL/min, or about 900 mL/min. In some embodiments, the solution of the first protein (e.g., compA) is pumped through the first line at a flow rate of about 1 L/min or greater than 1 L/min (e.g., about 2 L/min, about 3 L/min, about 4 L/min, about 5 L/min, about 6 L/min, about 7 L/min, about 8 L/min, about 9 L/min, about 10 L/min, about 20 L/min, about 30 L/min, about 40 L/min or about 50 L/min).

[0261] In some embodiments, solution of the second protein (e.g., compB) is pumped through a second line, e.g., via a pump, to form the second inlet fluid stream. In some embodiments, the solution of the second protein (e.g., compB) is pumped through the second line at a flow rate of at least about 100 mL/min. In some embodiments, the solution of the second protein (e.g., compB) is pumped through the second line at a flow rate of about 100 mL/min, about 200 mL/min, about 300 mL/min, about 400 mL/min, about 500 mL/min, about 600 mL/min, about 700 mL/min, about 800 mL/min, or about 900 mL/min. In some embodiments, the solution of the second protein (e.g., compB) is pumped through the second line at a flow rate of about 1 L/min or greater than 1 L/min (e.g., about 2 L/min, about 3 L/min, about 4 L/min, about 5 L/min, about 6 L/min, about 7 L/min, about 8 L/min, about 9 L/min, about 10 L/min, about 20 L/min, about 30 L/min, about 40 L/min or about 50 L/min).

[0262] In some embodiments, the first inlet stream comprising the solution of the first protein (e.g., compA) and the second inlet stream comprising the solution of the second protein (e.g., compB) are combined to form the outlet stream and passed through the static mixing element. In some embodiments, the first inlet stream and the second inlet stream are combined to form the outlet stream within the static mixing element. In some embodiments, the outlet stream comprises the solution of the first protein (e.g., compA) and the solution of the second protein (e.g., compB), wherein the solution of the first protein and the solution of the second protein are substantially homogenous, i.e., uniformly mixed, when the outlet stream exits the static mixing element.

Methods of Making Nanostructures using Microfluidics

[0263] In some embodiments, the method of mixing, blending, or combining the first protein (e.g., compA) and the second protein (e.g., compB) under conditions that minimize shear stress comprise microfluidic mixing. In some embodiments, the disclosure provides methods for making a nanostructure (e.g., pbVLP) comprising one or more protein components (e.g., compA and/or compB) using microfluidic mixing (see, e.g., Whitesides, George, M. Nature (2006) 442:368-373; Stroock, et al. Science (2002) 295:647-651; Valencia et al ACS Nano (2013) DOI/101.1021/nn403370e). As a non-limiting example, controlled microfluidic formulation includes a passive method for mixing streams of steady pressure-driven flows in micro channels at a low Reynolds number as described, e.g., in Stroock, et al. Science (2002) 295:647-651.

[0264] Microfluidics is a term commonly used to describe the study of fluid flow behavior inside channels of sub-millimeter cross-section. The microfluidic device is characterized in that physical phenomena generally classified under microtechnology are relevant in the fluidic channels and chambers arranged therein. These include, for example, capillary effects, and effects (especially mechanical effects) associated with surface tensions of the fluid. These additionally include effects such as thermophoresis and electrophoresis. In microfluidics, said phenomena are usually dominant over effects such as gravity. The microfluidic device can also be characterized in that it is produced at least in part using a layer-by-layer method and channels are arranged between layers of the layer structure. A microfluidic arrangement of chambers and interconnecting channels may be provided on a hydrophilic substrate, such as polydimethylsiloxane (PDMS), for convenient transport/manipulation of fluid or solutes from one chamber to another or within a channel. A substrate having a microfluidic arrangement like this may be called a microfluidic “chip” or “device.” The term “microfluidic” can also be characterized via the cross-sections or channels within the device that serve for guiding the fluid. For example, cross-sections are usually in the range from about 100 μm×100 μm to about 800 μm×800 μm. Exemplary microfluidic chips or microfluidic devices comprise a body of rigid material, e.g., thermoplastic material, comprising one or more fluid inlets, channels and mixing regions, and one or more outlets. Microfluidic devices are further described in U.S. Application Pub. Nos. 2020/0023358; 2012/0276209; 2014/0328759; 2016/0022580; and 2018/0111830, which are each incorporated herein by reference in their entirety.

[0265] In some embodiments, the method for making a nanostructure (e.g., pbVLP) comprising one or more protein components (e.g., compA and/or compB) comprises mixing of a first protein (e.g., compA) and a second protein (e.g., compB) using a microfluidic device. In some embodiments, the microfluidic device comprises (i) a first inlet for receiving a solution of the first protein (e.g., CompA); (ii) a second inlet for receiving a solution of the second protein (e.g., CompB); (iii) a first channel in fluid communication with the first inlet to provide a first inlet fluid stream comprising the solution of the first protein; (iv) a second channel in fluid communication with the second inlet to provide a second inlet fluid stream comprising the solution of the second protein; (v) an overlap region for receiving the first and second inlet fluid streams; and (vi) a third channel in fluid communication with the overlap region, wherein the first and second inlet fluid streams must flow through the third channel to form an outlet fluid stream, and wherein mixing of the solution of the first protein and the solution of the second protein occurs within the outlet fluid stream, thereby forming the nanostructures (e.g., VLPs) comprising the first protein and second protein.

[0266] As used herein, the term “channel” refers to a conduit of any desired shape or configuration through which a fluid stream is capable of being passed or directed. In some embodiments, the one or more of the dimensions of the channel are sub-millimeter (e.g., less than 500 microns). In some embodiments, the cross-section of the first channel, the second channel, and the third channel are each independently selected from: rectangular, round, square, circular, oval, ellipsoidal, or semi-circular. In some embodiments, the cross-section of the first channel has one or more dimensions less than 1 mm. In some embodiments, the cross-section of the first channel has one or more dimensions between about 30 nm and about 300 nm. In some embodiments, the cross-section of the second channel has one or more dimensions less than 1 mm. In some embodiments, the cross-section of the second channel has one or more dimensions between about 30 nm and about 300 nm. In some embodiments, the cross-section of the third channel has one or more dimensions less than 1 mm. In some embodiments, the cross-section of the third channel has one or more dimensions between about 30 nm and about 300 nm.

[0267] As used herein, the term “overlap region” refers to a zone of the microfluidic device wherein two or more channels comprising inlet fluid streams form a junction, wherein the inlet fluid streams have a principal flow direction towards the overlap region, and wherein the inlet fluid streams of the two or more channels are in fluid communication within the overlap region. In some embodiments, the microfluidic device comprises an overlap region between the first channel and the second channel. In some embodiments, the overlap region joins with the third channel. In some embodiments, the first channel, the second channel, and the third channel converge at the overlap region. In some embodiments, the overlap region receives the fluid stream in the first channel and the fluid stream in the second channel. In some embodiments, the fluid stream flows through the overlap region into the third channel. In some embodiments, the first channel, the second channel, and the third channel converge via a T-shaped or a Y-shaped overlap region.

[0268] In some embodiments, the third channel comprises a mixing channel. Micromixers for on-chip mixing have been developed based on different mechanisms to disturb laminar flow (see, e.g., Ward, K. (2015) 1 Micromech. Microeng. 25:094001). Such micromixers can be divided into two groups: passive and active micromixers (see, e.g., Nguyne and Wu (2005)J. Micromech. Microeng. 15:1). An active mixers rely on some form of external energy disturbance to generate a chaotic flow pattern in the microchannel. Typically, the external energy force is generated by a moving element in the micromixer itself, e.g., magnetically-actuated stirrers, or by the application of an external electrical force, e.g., pressure, ultrasound, acoustic, electrohydrodynamics, dielectrophoresis, electrokinetics, magnetohydrodynamics, thermal, etc. A passive mixing channel provides for mixing of two or more inlet fluid streams in the absence of turbulent flow conditions and without the use of moving elements. A passive mixing channel relies on the geometrical layout of the microchannels to cause lamination and/or chaotic advection. Designs for passive mixing channels include, but are not limited to, lamination-based designs that split streams and rejoin them after a certain distance (see, e.g., Ansari, et al. (2009) Chem Eng J. 146:439); staggered-herringbone design (see, e.g., Stroock, et al (2002) Science 295:647), and planar spiral microchannels (see, e.g., Sudarsan, et al (2006) Lab on a Chip, 6:74-82);

[0269] In some embodiments, the third channel comprises a passive mixing channel. In some embodiments, the passive mixing channel has a principal flow direction comprising laminar flow and comprises one or more passive elements to facilitate mixing. In some embodiments, the one or more passive elements comprises stream splitting and recombination. In some embodiments, the one or more passive elements comprises slanted wells, ridges, or grooves. In some embodiments, the one or more passive elements comprises channel overlaps, slits, converging/diverging regions, turns, and/or apertures, wherein the one or more passive elements promotes rapid and controlled mixing between two or more fluid streams. In some embodiments, a passive mixing channel suitable for use in the present disclosure is any known in the art, see e.g.; International Publication Number WO 97/00125; U.S. Pat. Nos. 6,890,093; 6,264,900; 7,160,025; and U.S. Application Nos. 2004/0262223; 2007/026377; 2021/0069699; 2020/0023358. In some embodiments, the third channel comprises a first region adapted for flowing the first and second inlet fluid streams under laminar flow conditions and a second region that is a passive mixing channel. In some embodiments, the second region comprises an active micromixer. In some embodiments, the third channel enables mixing of the contents of the first and second inlet fluid streams under conditions that provide nanostructures (e.g., VLPs) comprising the first protein and second protein.

[0270] In some embodiments, a method of the disclosure for making a nanostructure (e.g., pbVLPs) comprising one or more protein components (e.g., compA and/or compB) comprises: (i) introducing a first fluid stream comprising a solution of a first protein (e.g., compA) into the first inlet of the microfluidic device, (ii) introducing a second fluid stream comprising a solution of a second protein (e.g., compB) into the second inlet fluid stream of the microfluidic device, (iii) flowing the first inlet fluid stream under laminar flow conditions through the first channel of the microfluidic device into the third channel of the microfluidic device; and (iv) flowing the second inlet fluid stream under laminar flow conditions through the second channel of the microfluidic device into the third channel of the microfluidic device, wherein the first inlet fluid stream and the second inlet fluid stream form the outlet fluid stream, wherein mixing of the contents of the first fluid stream and the second fluid stream occurs in the third channel, thereby providing nanostructures (e.g., pbVLPs) comprising the one or more protein components.

[0271] In some embodiments, the solution of the first protein (e.g., compA) is pumped through the first channel using a first microfluidic pump, e.g., a syringe pump. In some embodiments, the solution of the first protein (e.g., compA) is pumped through the first channel at a flow rate of about 1 mL/min to about 20 mL/min. In some embodiments, the solution of the first protein (e.g., compA) is pumped through the first channel at a flow rate of about 2 mL/min. In some embodiments the solution of the first protein (e.g., compA) is pumped through the first channel at a flow rate of about 10 mL/min.

[0272] In some embodiments, the solution of the second protein (e.g., compB) is pumped through the second channel using a second microfluidic pump, e.g., a syringe pump. In some embodiments, the solution of the second protein (e.g., compB) is pumped through the second channel at a flow rate of about 1 mL/min to about 20 mL/min. In some embodiments, the solution of the second protein (e.g., compB) is pumped through the second channel at a flow rate of about 2 mL/min. In some embodiments the second solution is pumped through the second channel at a flow rate of about 10 mL/min. In some embodiments, the solution of the second protein (e.g., compB) is pumped through the second channel at a flow rate of about 10 mL/min, about 100 mL/min, about 200 mL/min, about 300 mL/min, about 400 mL/min, about 500 mL/min, about 600 mL/min, about 700 mL/min, about 800 mL/min, or about 900 mL/min. In some embodiments, the solution of the second protein (e.g., compB) is pumped through the second channel at a flow rate of about 1 L/min or greater than 1 L/min (e.g., about 2 L/min, about 3 L/min, about 4 L/min, about 5 L/min, about 6 L/min, about 7 L/min, about 8 L/min, about 9 L/min, about 10 L/min, about 20 L/min, about 30 L/min, about 40 L/min or about 50 L/min).

[0273] In some embodiments, the flow rate for the solution of the first protein (e.g., compA) being pumped through the first channel is equivalent to the flow rate being used to pump the solution of the second protein (e.g., compB) through the second channel. In some embodiments, the flow rate for the solution of the first protein (e.g., compA) being pumped through the first channel is greater than the flow rate being used to pump the solution of the second protein (e.g., compB) through the second channel. In some embodiments, the flow rate for the solution of the first protein (e.g., compA) being pumped through the first channel is less than the flow rate being used to pump the solution of the second protein (e.g., compB) through the second channel.

[0274] In some embodiments, a method of the disclosure for making a nanostructure (e.g., pbVLPs) comprising one or more protein components (e.g., compA and/or compB) comprises: (i) introducing a first fluid stream comprising a solution of a first protein (e.g., compA) into the first inlet of the microfluidic device at a first flow rate, wherein the first flow rate is about 2 ml/min to about 15 mL/min (ii) introducing a second fluid stream comprising a solution of a second protein (e.g., compB) into the second inlet fluid stream of the microfluidic device at a second flow rate, wherein the second flow rate is about 2 mL/min to about 15 mL/min (iii) flowing the first inlet fluid stream under laminar flow conditions through the first channel of the microfluidic device into the third channel of the microfluidic device; and (iv) flowing the second inlet fluid stream under laminar flow conditions through the second channel of the microfluidic device into the third channel of the microfluidic device, wherein mixing of the contents of the first fluid stream and the second fluid stream occurs in the third channel, and wherein the third channel provides an outlet fluid stream comprising nanostructures (e.g., pbVLPs) comprising the one or more protein components. In some embodiments, the rate of mixing is controlled by the first flow rate and the second flow rate. In some embodiments, the first flow rate and the second flow rate are selected to achieve rapid mixing. In some embodiments, the ratio of the first flow rate and the second flow rate is 1:1. In some embodiments, the first flow rate is greater than the second flow rate, wherein the ratio of the first flow rate and the second flow rate is 2:1, 3:1, 4:1, 5:1, 6:1, 7:1, 8:1, 9:1, or 10:1. In some embodiments, the second flow rate is greater than the first flow rate, wherein the ratio of the second flow rate and the first flow rate is 2:1, 3:1, 4:1, 5:1, 6:1, 7:1, 8:1, 9:1, or 10:1.

[0275] In some embodiments, the solution of the first protein (e.g., compA) comprises a molar concentration of the first protein (e.g., compA), and the solution of the second protein (e.g., compB) comprises a molar concentration of the second protein (e.g., compB), wherein the molar concentration of the first protein is substantially equivalent to the molar concentration of the second protein (i.e., about 1:1). In some embodiments, the molar concentration of the first protein (e.g., compA) is greater than the molar concentration of the second protein (e.g., compB). In some embodiments, the molar concentration of the first protein (e.g., compA) is greater than the molar concentration of the second protein (e.g., compB) by about 1.1, 1.2, 1.3, 1.4, 1.5, 2, 2.5, 3, 3.5, 4, 4.5, or 5-fold. In some embodiments, the molar concentration of the second protein (e.g., compB) is greater than the molar concentration of the first protein (e.g., compA). In some embodiments, the molar concentration of the second protein (e.g., compB) is greater than the molar concentration of the first protein (e.g., compA) by about 1.1, 1.2, 1.3, 1.4, 1.5, 2, 2.5, 3, 3.5, 4, 4.5, or 5-fold. In some embodiments, the molar concentration of the first protein (e.g., compA) is about 1-5 μM, 1-10 μM, 1-20 μM, 5-10 μM, 5-20 μM, 10-20 μM, 10-30 μM, 10-40 μM, or 10-50 μM. In some embodiments, the molar concentration of the first protein (e.g., compA) is about 50 μM, about 60 μM, about 70 μM, about 80 μM, about 90 μM, about 100 μM, about 200 μM, about 300 μM, or about 500 μM. In some embodiments, the molar concentration of the second protein (e.g., compB) is about 1-5 μM, 1-10 μM, 1-20 μM, 5-10 μM, 5-20 μM, 10-20 μM, 10-30 μM, 10-40 μM, or 10-50 μM. In some embodiments, the molar concentration of the second protein (e.g., compB) is about 50 μM, about 60 μM, about 70 μM, about 80 μM, about 90 μM, about 100 μM, about 200 μM, about 300 μM, or about 500 μM In some embodiments, the molar concentration of the first protein (e.g., compA) is about 1-20 μM and the molar concentration of the second protein (e.g., compB) is about 1-20 μM. In some embodiments, the molar concentration of the first protein (e.g., compA) is about 10 μM and the molar concentration of the second protein (e.g., compB) is about 8 μM. In some embodiments, the molar concentration of the first protein (e.g., compA) is about 100-500 μM and the molar concentration of the second protein (e.g., compB) is about 100-500 μM.

[0276] In some embodiments, the nanostructures of the disclosure are prepared using a micromixer chip such as, but not limited to, those from Harvard Apparatus (Holliston, Mass.), Dolomite Microfluidics (Royston, UK), Precision Nanosystems (Vancouver, BC), or Cytiva (Marlborough, Mass.). In some embodiments, the nanostructures of the disclosure are prepared using a micromixer chip as described in US20200023358, which is hereby incorporated by reference. In some embodiments, the nanostructures of the disclosure are prepared using a microfluidic mixing instrument based on the NanoAssembler platform (Precision Nanosystems (Vancouver, BC); Cytiva (Marlborough, Mass.)). In some embodiments, the nanostructures of the disclosure are prepared using a NanoAssembler Ignite system.

[0277] In some embodiments, the method of mixing, blending, or combining the first protein (e.g., compA) and the second protein (e.g., compB) under conditions that minimize shear stress (e.g., microfluidic mixing) results in improved yield of nanostructures comprising the first and second proteins (e.g., pbVLPs) as compared to mechanical mixing (e.g., using a blade, stir bar, or impeller) of the first and second protein. Methods for measuring yield of nanostructures (e.g., pbVLPs) is known in the art and includes quantifying the weight percent of total protein formed into nanostructure using, e.g., size exclusion chromatograph (SEC). In some embodiments, the method of mixing, blending, or combining the first protein (e.g., compA) and the second protein (e.g., compB) under conditions that minimize shear stress results in a yield of nanostructure (e.g., pbVLP) that is at least about 30%, about 40%, about 50%, about 60%, about 70%, or higher of total protein as measured by SEC. In some embodiments, the nanostructure is formed at a weight percent that is about 40% of total protein as measured by SEC. In some embodiments, the nanostructure is formed at a weight percent that is about 45% of total protein as measured by SEC. In some embodiments, the nanostructure is formed at a weight percent that is about 55% of total protein as measured by SEC. In some embodiments, the nanostructure is formed at a weight percent that is about 60% of total protein as measured by SEC. In some embodiments, the nanostructure is formed at a weight percent that is about 70%, about 75%, about 80%, about 85%, about 90%, or about 95% of total protein as measured by SEC.

[0278] In some embodiments, the method of mixing, blending, or combining the first protein (e.g., compA) and the second protein (e.g., compB) under conditions that minimize shear stress (e.g., microfluidic mixing) results in formation of nanostructures comprising the first and second proteins (e.g., pbVLPs) having a reduced polydispersity index as compared to mechanical mixing (e.g., using a blade, stir bar, or impeller) of the first and second protein. Methods for measuring the polydispersity of nanostructures are known in the art, and include SEC, light scattering (e.g., dynamic light scattering), and transmission electron microscopy (TEM). In some embodiments, the method of mixing, blending, or combining the first protein (e.g., compA) and the second protein (e.g., compB) under conditions that minimize shear stress results in formation of nanostructures having a polydispersity index that is less than about 0.4, about 0.35, about 0.3, about 0.25, about 0.2, about 0.15, or about 0.1.

### Methods of Purifying Nanostructures

[0279] The present disclosure provides methods for purifying nanostructures described herein (e.g., pbVLP particles) to remove excess soluble proteins (e.g., compA and/or compB) and/or impurities. As described herein, it was discovered that passing a mixture of pbVLPs through a large pore (e.g., about 1,000 kDa) filter with a hydrophilic membrane (e.g., regenerated cellulose (CRC) membrane) provided a solution of pbVLPs with a high degree of purity (e.g., >90%), without substantially reducing the yield of pbVLPs. In contrast, it was found that passing a mixture of pbVLPs through a large pore filter with a hydrophobic membrane (e.g., Pellicon Biomax 1000 kDa) or use of an alternative purification method (e.g., a Butyl Convective Interaction Media (CIM) column or a Captocore700 column) substantially diminished the yield of pbVLPs.

[0280] Accordingly, in some embodiments, the disclosure provides methods for purifying nanostructures described herein (e.g., pbVLPs) by filtration through a large pore hydrophilic membrane. In some embodiments, the filtering is performed by tangential flow filtration (TFF). In some embodiments, the hydrophilic membrane has a pore size of about 1,000 kDa. In some embodiments, the membrane has a pore size of about 300 kDa, about 400 kDa, about 500 kDa, about 600 kDa, about 700 kDa, about 800 kDa, or about 900 kDa. In some embodiments, the membrane has a pore size greater than about 1,000 kDa. In some embodiments, the membrane has a pore size of about 1100 kDa, about 1200 kDa, about 1300 kDa, about 1400 kDa, about 1500 kDa, about 2000 kDa, about 2500 kDa, or about 3000 kDa. In some embodiments, the hydrophilic membrane comprises a material selected from: cellulose, CRC, polytetrafluoroethylene (PTFE), polyvinylidene fluoride (PVDF), nylon, and polyethersulfone. In some embodiments, the large pore hydrophilic membrane is a CRC membrane with a pore size of about 1,000 kDa. In some embodiments, the large pore hydrophilic membrane is a Ultracel® 1000 kDa Membrane or an equivalent thereof.

[0281] In some embodiments, the purifying provides nanostructures (e.g., pbVLPs) with high purity, e.g., having minimal excess soluble protein (e.g., CompA and/or CompB), and/or impurities as measured by SEC. In some embodiments, the purity is measured as the percentage of total protein in the filtered solution that is formed into nanostructures, e.g., using SEC. In some embodiments, the purity is at least about 80%, 85%, 90%, 91%, 92%, 93%, 94%, 95%, 96%, 97%, 98%, or >99%. In some embodiments, the purifying provides the nanostructures (e.g., pbVLPs) without substantial loss relative to the mixture of nanostructures prior to the filtration, e.g., as measured by SEC. In some embodiments, at least about 80%, 85%, 90%, 91%, 92%, 93%, 94%, 95%, 96%, 97%, 98%, or >99% of nanostructures (e.g., pbVLPs) in the mixture prior to the filtration are recovered following passing through the large pore hydrophilic membrane, e.g., as measured by SEC.

### Exemplary Methods of Making Nanostructures

[0282] In some embodiments, the disclosure provides a method of making pbVLPs comprising compA and compB proteins, the method comprising (i) addition of compA protein to a solution comprising compB protein, optionally as compA emerges from the last step in its purification process (e.g., filtration); and (ii) mixing, blending, or combining compA under conditions that minimize shear stress, e.g., as compared to mechanical mixing of compA and compB, thereby forming the pbVLP comprising compA and compB proteins. In some embodiments, the conditions of (ii) comprising mixing the solution without mechanical mixing (e.g., using a blade, stir bar, or impeller). In some embodiments the conditions of (ii) comprise orbital agitation or microfluidic mixing. In some embodiments, the conditions of (ii) result in a partial or substantially homogenous mixture of compA and compB that facilitates assembly of compA and compB to form pbVLPs.

[0283] In some embodiments, the method comprises (i) addition of compA protein to a solution comprising compB protein, optionally as compA emerges from the last step in its purification process (e.g., filtration); and (ii) mixing, blending, or combining the compA and compB proteins by orbital agitation, thereby forming pbVLPs comprising compA and compB proteins. In some embodiments, the method comprises (i) addition of compA protein to a solution comprising compB protein, optionally as compA emerges from the last step in its purification process (e.g., filtration); (ii) providing conditions for mixing, blending, or combining of the solution by orbital agitation to form the pbVLPs; and (iii) purifying the pbVLPs to remove excess compA, excess compB, and/or impurities comprising filtering the solution with a large pore hydrophilic membrane by TFF. In some embodiments, the orbital agitation of (ii) comprises use of an orbital shaking platform. In some embodiments, the orbital agitation of (ii) is performed at about 20-25° C. In some embodiments, the orbital agitation of (ii) is performed for a duration between about 6 to about 24 hours. In some embodiments the orbital agitation of (ii) is performed for a duration between about 8 to about 12 hours. In some embodiments, the orbital agitation of (ii) is performed at a speed of about 80 to about 100 rpm. In some embodiments, the large pore hydrophilic membrane of (iii) is a CRC membrane comprising a pore size of about 300-3000 kDa, about 800 kDa, about 900 kDa, about 1,000 kDa, about 1100 kDa, about 1200 kDa, about 13 kDa, about 1400 kDa, or about 1500 kDa. In some embodiments, the large pore hydrophilic membrane of (iii) is a CRC membrane comprising a pore size of about 1000 kDa. In some embodiments, the large pore hydrophilic membrane of (iii) is a 1,000 kDa membrane is Ultracel® 1000 kDa Membrane or an equivalent thereof. In some embodiments, the solution comprising compB protein is prepared from one or more frozen batches of compB protein. In some embodiments, the steps of (i) and (ii) are a continuous process. In some embodiments, the steps of (i), (ii), and (iii), if present, are a continuous process. In some embodiments, compA protein is continuously produced prior to the addition of (i).

[0284] In some embodiments, the method of making pbVLPs comprising compA proteins and compB proteins comprises a microfluidic device. In some embodiments, the method comprises (i) providing a first inlet fluid stream comprising compA protein and a second inlet fluid stream comprising compB protein, and (ii) contacting the first inlet fluid stream and the second inlet fluid stream to form an outlet stream, wherein mixing, blending, or combining of the compA protein and the compB protein occurs in the outlet stream, thereby forming the pbVLP.

[0285] In some embodiments, the method comprises (i) providing a first inlet fluid stream comprising compA that flows through a first channel of a microfluidic device and a second inlet fluid stream comprising compB protein that flows through a second channel of the microfluidic device, and (iii) contacting the first inlet fluid stream and the second inlet fluid stream to form an outlet stream that flows through a third channel of the microfluidic device, wherein the first channel, second channel, and third channel are connected at an overlap region, e.g., having a T-shaped or Y-shaped configuration, and wherein the contacting of the first inlet fluid stream with the second inlet fluid stream enables mixing, blending, or combining of compA and compB, thereby resulting in formation of the pbVLPs. In some embodiments, the mixing, blending, or combining is facilitated by one or more passive diffusion elements present in the outlet stream, e.g., as splitting and recombination channels, grooves, slanted wells, or ridges. In some embodiments, the microfluidic device is a NanoAssemblr Ignite cartridge. In some embodiments, the method further comprises purifying the pbVLPs to remove excess compA, excess compB, and/or impurities comprising filtering the solution with a large pore hydrophilic membrane by TFF. In some embodiments, the large pore hydrophilic membrane of is a CRC membrane comprising a pore size of about 300-3000 kDa, about 800 kDa, about 900 kDa, about 1,000 kDa, about 1100 kDa, about 1200 kDa, about 13 kDa, about 1400 kDa, or about 1500 kDa. In some embodiments, the large pore hydrophilic membrane is a CRC membrane comprising a pore size of about 1000 kDa. In some embodiments, the large pore hydrophilic membrane of is a 1,000 kDa membrane is Ultracel® 1000 kDa Membrane or an equivalent thereof. In some embodiments, the flow path of the outlet stream feeds directly into the TFF, thereby providing a continuous process for production and purification of the pbVLPs. In some embodiments, the compA protein is continuously produced prior to introduction to the first inlet fluid stream.

[0286] In some embodiments, the method provides a substantially pure composition of pbVLPs comprising compA and compB, e.g., having minimal excess soluble protein (e.g., CompA and/or CompB), and/or impurities as measured by SEC. In some embodiments, the purity of the pbVLPs is determined as the weight percent of total protein in the purified solution that is pbVLPs as measured by SEC. In some embodiments, at least about 80%, 85%, 90%, 91%, 92%, 93%, 94%, 95%, 96%, 97%, 98%, or >99% of total protein in the purified solution is pbVLPs.

[0287] In some embodiments, the compA protein is a dimer described herein. In some embodiments, the compA protein is a trimer described herein. In some embodiments, the compA protein is a pentamer described herein. In some embodiments, the compA protein comprises a polypeptide sequence having at least about 80%, 85%, 90%, 91%, 92%, 93%, 94%, 95%, 96%, 97%, 98%, 99%, or 100% sequence identity to any one of SEQ IN NOs: 1, 3, 5, 7, 9, 11, 13, 15, 17, 19, 21, 23, 25, 26, 29-31, 35, 37, 39, 41, 43, 45, 47, 49, 51, 53, 55, 57, and 59. In some embodiments, the compB protein is a dimer described herein. In some embodiments, the compB protein is a trimer described herein. In some embodiments, the compB protein is a pentamer described herein. In some embodiments, the compB protein comprises a polypeptide sequence having at least about 80%, 85%, 90%, 91%, 92%, 93%, 94%, 95%, 96%, 97%, 98%, 99%, or 100% sequence identity to any one of SEQ IN NOs: 2, 4, 6, 8, 10, 12, 14, 16, 18, 20, 22, 24, 27, 28, 32-34, 36, 38, 40, 42, 44, 46, 48, 50, 52, 54, 56, and 58.

[0288] In some embodiments, the compA protein is a trimer and the compB protein is a pentamer. In some embodiments, the compA protein and the compB protein each comprises a polypeptide sequence having at least about 80%, 85%, 90%, 91%, 92%, 93%, 94%, 95%, 96%, 97%, 98%, 99%, or 100% sequence identity to SEQ ID NOS: 39 and 40 respectively. In some embodiments, the compA protein comprises a polypeptide sequence having at least about 80%, 85%, 90%, 91%, 92%, 93%, 94%, 95%, 96%, 97%, 98%, 99%, or 100% sequence identity to SEQ ID NO: 7 and the compB protein comprises a polypeptide sequence having at least about 80%, 85%, 90%, 91%, 92%, 93%, 94%, 95%, 96%, 97%, 98%, 99%, or 100% sequence identity to any one of SEQ ID NOS: 8, 32, 33, and 34. In some embodiments, the compA protein comprises a polypeptide sequence having at least about 80%, 85%, 90%, 91%, 92%, 93%, 94%, 95%, 96%, 97%, 98%, 99%, or 100% sequence identity to SEQ ID NO: 29 and the compB protein comprises a polypeptide sequence having at least about 80%, 85%, 90%, 91%, 92%, 93%, 94%, 95%, 96%, 97%, 98%, 99%, or 100% sequence identity to any one of SEQ ID NOS: 8, 32, 33, and 34. In some embodiments, the compA protein comprises a polypeptide sequence having at least about 80%, 85%, 90%, 91%, 92%, 93%, 94%, 95%, 96%, 97%, 98%, 99%, or 100% sequence identity to SEQ ID NO: 30 and the compB protein comprises a polypeptide sequence having at least about 80%, 85%, 90%, 91%, 92%, 93%, 94%, 95%, 96%, 97%, 98%, 99%, or 100% sequence identity to any one of SEQ ID NOS: 8, 32, 33, and 34. In some embodiments, the compA protein comprises a polypeptide sequence having at least about 80%, 85%, 90%, 91%, 92%, 93%, 94%, 95%, 96%, 97%, 98%, 99%, or 100% sequence identity to SEQ ID NO: 31 and the compB protein comprises a polypeptide sequence having at least about 80%, 85%, 90%, 91%, 92%, 93%, 94%, 95%, 96%, 97%, 98%, 99%, or 100% sequence identity to any one of SEQ ID NOS: 8, 32, 33, and 34.

### Nucleic Acids

[0289] In another aspect, the present disclosure provides isolated nucleic acids encoding an antigen, a first component, and/or a second component, of the present disclosure. The isolated nucleic acid sequence may comprise RNA or DNA. As used herein, “isolated nucleic acids” are those that have been removed from their normal surrounding nucleic acid sequences in the genome or in cDNA sequences. Such isolated nucleic acid sequences may comprise additional sequences useful for promoting expression and/or purification of the encoded protein, including but not limited to polyA sequences, modified Kozak sequences, and sequences encoding epitope tags, export signals, and secretory signals, nuclear localization signals, and plasma membrane localization signals. It will be apparent to those of skill in the art, based on the teachings herein, what nucleic acid sequences will encode the proteins of the disclosure.

[0290] In a further aspect, the present disclosure provides recombinant expression vectors comprising the isolated nucleic acid of any embodiment or combination of embodiments of the disclosure operatively linked a suitable control sequence. “Recombinant expression vector” includes vectors that operatively link a nucleic acid coding region or gene to any control sequences capable of effecting expression of the gene product. “Control sequences” operably linked to the nucleic acid sequences of the disclosure are nucleic acid sequences capable of effecting the expression of the nucleic acid molecules. The control sequences need not be contiguous with the nucleic acid sequences, so long as they function to direct the expression thereof. Thus, for example, intervening untranslated yet transcribed sequences can be present between a promoter sequence and the nucleic acid sequences and the promoter sequence can still be considered “operably linked” to the coding sequence. Other such control sequences include, but are not limited to, polyadenylation signals, termination signals, and ribosome binding sites. Such expression vectors can be of any type known in the art, including but not limited to plasmid and viral-based expression vectors. The control sequence used to drive expression of the disclosed nucleic acid sequences in a mammalian system may be constitutive (driven by any of a variety of promoters, including but not limited to, CMV, SV40, RSV, actin, EF) or inducible (driven by any of a number of inducible promoters including, but not limited to, tetracycline, ecdysone, steroid responsive). The construction of expression vectors for use in transfecting prokaryotic cells is also well known in the art, and thus can be accomplished via standard techniques. (See, for example, Sambrook, Fritsch, and Maniatis, in: Molecular Cloning, A Laboratory Manual, Cold Spring Harbor Laboratory Press, 1989; Gene Transfer and Expression Protocols, pp. 109-128, ed. E. J. Murray, The Humana Press Inc., Clifton, N.J.), and the Ambion 1998 Catalog (Ambion, Austin, Tex.). The expression vector must be replicable in the host organisms either as an episome or by integration into host chromosomal DNA. In a preferred embodiment, the expression vector comprises a plasmid. However, the disclosure is intended to include other expression vectors that serve equivalent functions, such as viral vectors.

[0291] In another aspect, the present disclosure provides host cells that have been transfected or transduced with the recombinant expression vectors disclosed herein, wherein the host cells can be either prokaryotic or eukaryotic. The cells can be transiently or stably transfected or transduced. Such transfection or transduction of expression vectors into prokaryotic and eukaryotic cells can be accomplished via any technique known in the art, including but not limited to standard bacterial transformations, calcium phosphate co-precipitation, electroporation, or liposome mediated-, DEAE dextran mediated-, polycationic mediated-, or viral mediated transfection. (See, for example, Molecular Cloning: A Laboratory Manual (Sambrook, et al., 1989, Cold Spring Harbor Laboratory Press; Culture of Animal Cells: A Manual of Basic Technique, 2nd Ed. (R. I. Freshney. 1987. Liss, Inc. New York, N.Y.).

[0292] In another aspect, the disclosure provides a method of producing an antigen, component, or pbVLP according to the disclosure. In some embodiments, the method comprises the steps of (a) culturing a host according to this aspect of the disclosure under conditions conducive to the expression of the polypeptide, and (b) optionally, recovering the expressed polypeptide.

[0293] In some embodiments, the disclosure provides a method of manufacturing a vaccine, comprising culturing a host cell comprising a polynucleotide comprising a sequence encoding the antigen of the disclosure in a culture medium so that the host cell secretes the antigen into the culture media; optionally purifying the antigen from the culture media; mixing the antigen with a second component, wherein the second component multrimerizes with the antigen to form a pbVLP; and optionally purifying the pbVLP.

[0294] In some embodiments, the disclosure provides method of manufacturing a vaccine, comprising culturing a host cell comprising one or more polynucleotides comprising sequences encoding both components of the pbVLP of any one of disclosure so that the host cell secretes the first component and the second component into the culture media; and optionally purifying the pbVLP from the culture media.

[0295] Illustrative host cells in include E. coli cells, 293 and 293F cells, HEK293 cells, Sf9 cells, Chinese hamster ovary (CHO) cells and any other cell line used in the production of recombinant proteins.

### Formulation

[0296] In some embodiments, the buffer in the composition is a Tris buffer, a histidine buffer, a phosphate buffer, a citrate buffer or an acetate buffer. The composition may also include a lyoprotectant, e.g. sucrose, sorbitol or trehalose. In certain embodiments, the composition includes a preservative e.g. benzalkonium chloride, benzethonium, chlorohexidine, phenol, m-cresol, benzyl alcohol, methylparaben, propylparaben, chlorobutanol, o-cresol, p-cresol, chlorocresol, phenylmercuric nitrate, thimerosal, benzoic acid, and various mixtures thereof. In other embodiments, the composition includes a bulking agent, like glycine. In yet other embodiments, the composition includes a surfactant e.g., polysorbate-20, polysorbate-40, polysorbate-60, polysorbate-65, polysorbate-80 polysorbate-85, poloxamer-188, sorbitan monolaurate, sorbitan monopalmitate, sorbitan monostearate, sorbitan monooleate, sorbitan trilaurate, sorbitan tristearate, sorbitan trioleaste, or a combination thereof. The composition may also include a tonicity adjusting agent, e.g., a compound that renders the formulation substantially isotonic or isoosmotic with human blood. Exemplary tonicity adjusting agents include sucrose, sorbitol, glycine, methionine, mannitol, dextrose, inositol, sodium chloride, arginine and arginine hydrochloride. In other embodiments, the composition additionally includes a stabilizer, e.g., a molecule which substantially prevents or reduces chemical and/or physical instability of the VLP, in lyophilized or liquid form. Exemplary stabilizers include sucrose, sorbitol, glycine, inositol, sodium chloride, methionine, arginine, and arginine hydrochloride.

### Methods of Use

[0297] In some embodiments, the disclosure provides methods for treating or preventing a disease or disorder in a subject in need thereof comprising administering a nanostructure (e.g., pbVLP) prepared according to a method described herein. In some embodiments, the disclosure provides a method for inducing, promoting, or increasing an immune response in a subject in need thereof, comprising administering a nanostructure (e.g., pbVLP) prepared according to a method described. In some embodiments, the nanostructure comprises one or more antigens. In some embodiments, the one or more antigens are displayed on the surface of the nanostructure. In some embodiments, the nanostructure comprises one or more immunostimulatory molecules attached to the exterior and/or encapsulated in the cage interior. As used herein, an immunostimulatory molecules is a compound that stimulates an immune response (including enhancing a pre-existing immune response) in a subject to whom it is administered, whether alone or in combination with another agent (e.g., an antigen). Exemplary immunostimulatory molecules include, but are not limited to, TLR ligands.

[0298] In some embodiments, the disclosure provides a method for inducing, promoting, or increasing an immune response in a subject in need thereof, comprising administering a nanostructure (e.g., pbVLP) prepared according to a method described herein as an immunogenic composition or vaccine. Upon introduction into a host, the immunogenic composition or vaccine provokes an immune response. The “immune response” refers to a response that induces, increases, or perpetuates the activation or efficiency of innate or adaptive immunity. In some embodiments, the immune response comprises production of antibodies and/or cytokines. In some embodiments, the immune response comprises activation of cytotoxic T cells, antigen presenting cells, helper T cells, dendritic cells, B cells, and/or other cellular responses.

[0299] In some embodiments, the disclosure provides a method for inducing, promoting, or increasing an antibody response in a subject in need thereof, comprising administering a nanostructure (e.g., pbVLP) prepared according to a method described herein as an immunogenic composition or vaccine, wherein the nanostructure displays one or more antigens, and wherein the antibody response is directed to epitopes present on the one or more antigens. Methods for analyzing an antibody response in a subject are known to those of skill in the art. For example, in some embodiments, an increase in an immune response is measured by ELISA to determine antigen-specific antibody titers.

[0300] In some embodiments, the disclosure provides a method for inducing, promoting, or increasing an immune response comprising an improved B-memory cell response in a subject in need thereof, comprising administering a nanostructure (e.g., pbVLP) prepared according to a method described herein as an immunogenic composition or vaccine in immunized subjects. An improved B-memory cell response is intended to mean an increased frequency of peripheral blood B cells capable of differentiation into antibody-secreting plasma cells upon antigen encounter as measured by stimulation of in vitro differentiation. In some embodiments, the disclosure provides methods for increasing the number of antibody-secreting B cells. In some embodiments, the antibody-secreting B cells are bone marrow plasma cells or germinal B cells. In some embodiments, methods for measuring antibody secreting B cells includes, but is not limited to, antigen-specific ELISPOT assays and flow cytometry of plasma cells or germinal center B cells collected at various time points post-immunization.

[0301] In some embodiments, the nanostructure (e.g., pbVLP) is administered as part of a prophylactic immunogenic composition or vaccine, wherein the immunogenic composition or vaccine confers resistance in a subject to subsequent exposure to infectious agents. In some embodiments, the nanostructure (e.g., pbVLP) is administered as part of a therapeutic immunogenic composition or vaccine, wherein the immunogenic composition or vaccine initiates or enhances a subject's immune response to a pre-existing antigen. In some embodiments, the pre-existing antigen is a viral antigen in a subject infected with an infectious agent or neoplasm. In some embodiments, the pre-existing antigen is a cancer antigen in a subject with a tumor or malignancy. The desired outcome of a prophylactic or therapeutic immune response depends upon the disease or condition being treated, according to principles well known in the art. For example, in some embodiments, an immune response against an infectious agent may completely prevent colonization and replication of an infectious agent. In some embodiments, a vaccine against infectious agents is considered effective if it reduces the number, severity, or duration of symptoms, if it reduces the number of individuals in a population with symptoms, or reduces the transmission of an infectious agent. In some embodiments, an immune response against cancer, allergens, or infectious agents is effective it completely treats a disease, alleviates symptoms, or contributes to an overall therapeutic intervention against a disease.

[0302] In some embodiments, the disclosure provides a method for treating or preventing an acute or chronic infectious disease in a subject in need thereof, comprising administering a nanostructure (e.g., pbVLP) prepared according to a method describe herein as an immunogenic composition or vaccine. In some embodiments, the nanostructure (e.g., pbVLP) comprises one or more infectious disease antigens. In some embodiments, the one or more infectious disease antigens is a microbial antigen. Microbial antigens are antigens derived from a microbial species, e.g., a bacteria, virus, fungus, parasite, or mycobacterium. In some embodiments, the disclosure provides a method for treating or preventing a viral infection in a subject in need thereof, comprising administering a nanostructure (e.g., pbVLP) prepared according to a method describe herein as an immunogenic composition or vaccine, wherein the nanostructure comprises one or more infectious disease antigens derived from the virus. In some embodiments, the viral infection is immunodeficiency (e.g., HIV, papilloma (e.g., HPV), herpes (e.g., HSV), encephalitis, influenza (e.g., human influenza virus A), COVID-19 (e.g., SARS-CoV-2), and common cold (e.g., human rhinovirus, respiratory syncytial virus). In some embodiments, the disclosure provides a method for reducing a viral infection in a subject in need thereof, comprising administering to the subject a nanostructure (e.g., pbVLP) prepared according to a method described herein.

[0303] In some embodiments, the disclosure provides a method for treating or preventing a disorder associated with abnormal apoptosis, a differentiation process (e.g., cellular proliferative disorders, e.g., hyperproliferative disorders), or a cellular differentiation disorder (e.g., cancer). Examples of cellular proliferative and/or differentiative disorders include cancer (e.g., carcinoma, carcinoma, metastatic disorders, or hematopoietic neoplastic disorders). In some embodiments, an immunogenic composition or vaccine comprising a nanostructure (e.g., pbVLP) prepared according to a method described herein is administered to a subject who has cancer. The term “cancer” refer to malignancies of the various organ systems, including those affecting the lung, breast, thyroid, lymphoid tissues, gastrointestinal organs, and the genitourinary tract, as well as to adenocarcinomas that are generally considered to include malignancies such as most colon cancers, renal-cell carcinomas, prostate cancer and/or testicular tumors, non-small cell carcinoma of the lung, cancer of the small intestine, and cancer of the esophagus. In some embodiments, the immunogenic composition or vaccine is used to treat a subject who has, who is suspected of having, or who may be at high risk for developing any type of cancer.

[0304] In some embodiments, the disclosure provides methods for inducing an anti-tumor immune response in a subject with cancer, comprising administering an immunogenic composition or vaccine comprising a nanostructure (e.g., pbVLP) prepared according to a method described herein. In some embodiments, the nanostructure comprises one or more antigens, wherein the antigens are cancer antigens. A cancer antigen is an antigen that is expressed preferably on cancer cells (i.e., it is expressed at higher levels in cancer cells than on non-cancer cells) and in some instances is solely expressed by cancer cells. The cancer antigen may be expressed within a cancer cell or on the surface of the cancer cell. In some embodiments, administering the immunogenic composition or vaccine comprising a nanostructure (e.g., pbVLP) comprising one or more cancer antigens induces an anti-tumor immune response, thereby preventing or treating a cancer in the subject.

### EXAMPLES

### Example 1

[0305] This example demonstrates improvement in the assembly process for a two-component nanostructure by employing slow addition of CompB to CompA under the surface of the CompA solution. Purified component A (compA) protein (I53-50A) fused to RSV antigen and purified component B (compB) protein (I53-50B) were separately purified into assembly buffer. The compA sample was added dropwise from a 22 G ½ needle at about 0.6 mL/min to the compB sample under stirring at 100 rpm with a magnetic stir bar over about 10 minutes, to a final molar ratio of 1:1 compA:compB. The experimentation set up is shown in FIG. 3A. A turbid solution was formed (FIG. 3B, left). The pellet (FIG. 3B, right) did not, however contain the compA:compB assembly, which remained in solution.

[0306] Next, the same assembly reaction was performed using a serological pipette slowly dispensing 2504 CompA into 25 μM CompB (about 30 mL volume per each) under the surface of the CompB solution at about 20 mL/min, without a stir bar. After addition of the CompA solution into the CompB solution, the mixture was placed only an orbital agitation platform overnight at 80 rpm at room temperature. Slight turbidity was removed by centrifugation at 2000×g for five minutes. As shown in the bottom panel of FIG. 4, high performance liquid chromatograph (HPLC) analysis demonstrated formation of the VLP assembly (50%) with minor peaks for high molecular weight (HMW) aggregate (7.6%), excess CompA (9.5%) and other impurities (31.6%).

[0307] In conclusion, mixing with a stir bar placed into the solution during assembly led to reduced product quality (assessed by SE-HPLC). Mixing the solution by orbital agitation platform improved product quality.

### Example 2

[0308] This example demonstrates improvement in the assembly process for a two-component nanostructure by employing a 1000 kDa molecule weight cut-off membrane composed of composite regenerated cellulose (Pellicon Ultracel 1000 kDa) to separate pbVLP from lower molecular weight impurities. The crude pbVLP mixture was prepared by dispensing a solution of CompA fused to RSV into a solution of CompB, at a molar ratio of 1:1, followed by orbital agitation as described in Example 1. The pbVLP is purified from 45% w/w total protein to 97% w/w total protein (2×purification) with a yield of 95%. In contrast, other purification strategies exhibited poor yield. Purification strategies having poor yield included hydrophobic (Pellicon Biomax 1000 kDa) membrane filtration (17% yield), Butyl CIM chromatography (0% yield) and Captocore700 chromatography. Data from Tangential Flow Filtration (TFF) using a Pellicon Biomax 1000 kDa membrane are summarized in Table 4 below. The crude pbVLP mixture loaded for filtration (“TFF Load”) had a total protein concentration of 1.18 mg/mL and contained 70.8 mg total protein. The crude pbVLP was filtered using a diafiltrate volume that was either 10-fold or 5-fold greater than the load volume. The purity and yield of the pbVLP was high for both conditions.

TABLE 4
Tangential Flow Filtration using a Pellicon Ultracel 1000 kDa Membrane

| | | Total | Re- | | | |
|---|---|---|---|---|---|---|
| | Concentration | protein | covery | Purity | Amount | Yield |
| Fractions | (mg/mL) | (mg) | (%) | (%) | (mg) | (%) |
| TFF Load | 1.18 | 70.8 | 100 | 45 | 31.86 | 100 |
| TFF Retentate, | 0.52 | 31.2 | 44.1 | 95.3 | 29.73 | 93.3 |
| after 10 × | | | | | | |
| volume | | | | | | |
| diafiltration for | | | | | | |
| purification | | | | | | |
| TFF Retentate, | 1.46 | 29.2 | 93.6 | 96.8 | 28.27 | 95.1 |
| after 5 × | | | | | | |
| diafiltration to | | | | | | |
| exchange into | | | | | | |
| formulation | | | | | | |
| buffer | | | | | | |

[0309] In conclusion, contacting the pbVLP assembly with a 1,000 kilodalton molecular weight cut-off membrane to purify the pbVLP increased purity without impacting product quality. Data shows the SE profile was not affected (FIG. 5). Several other purification methods degraded the SE profile (FIG. 6). Using Pellicon Biomax 1000 kDa to purify the VLP gave a yield of 17% and changed the SE-HPLC profile. Using a Pellicon Ultracel 1000 kDa membrane gives a nearly 100% yield.

### Example 3

[0310] Scalable assembly of virus-like-particles using the two-component CompA/CompB system requires unit operations that provide robust, homogenous and rapid mixing of input process solutions, and results in pbVLPs with the desired product quality attributes. Ideally, the assembly unit operation would additionally be amenable to continuous manufacturing configurations. The NanoAssemblr® Ignite™ system (Product code NIN0001) is a microfluidics mixing device that delivers process solutions at precise flow rates and ratios, and utilizes disposable cartridges containing a precisely defined mixing flowpath. The Ignite system is designed to provide a representative small-scale model to evaluate mixing operations that can be directly scaled up using process equipment that can be configured to allow continuous manufacturing.

[0311] To evaluate pbVLP assembly using a microfluidics mixing approach, the Ignite system was used to assemble pbVLPs from a trimer of CompA (I53-50A) fused to an hMPV antigen having a his-tag (CompA-hMPV-his; homologous to SEQ ID NO: 60 shown in Table 3) and a CompB-01 pentamer (SEQ ID NO: 63 shown in Table 3). For VLP assembly using the Ignite microfluidics mixing system, the individual components were adjusted to defined concentrations (10 μm CompA/8 μm CompB) in assembly buffer (20 mM Tris, 250 mM sodium chloride, 5% glycerol, pH-7.4) and loaded into single-use 1 mL BD syringes. The loaded syringes were attached to distinct channels of single-use, disposable Ignite NxGen microfluidic cartridges and assembly reaction conducted by passing the stock solutions through cartridges at a 1:1 volume ratio and two different total system flow rates (2 mL/min and 10 mL/min). Standard assembly reactions were conducted by adding the stock solutions to microcentrifuge tubes at a 1:1 volume ratio using a pipette for addition of compA fusion to compB, followed by orbital shaking to achieve mixing. HPLC-SEC analysis was used to assess pbVLP assembly compared to a CompA control (10 uM CompA-hMPV-his; R1 in FIG. 8A). As shown in FIG. 8A, standard assembly (R2) and assembly by the Ignite microfluidic mixing system at either 2 mL/min (R3) or 10 mL/min (R4) yielded pbVLP.

[0312] Also evaluated was the use of the Ignite system to assemble pbVLP from a trimer of CompA (I53-50A) fused to an RSV antigen (CompA-RSV-02; SEQ ID NO: 61 shown in Table 3) and a CompB-01 pentamer (SEQ ID NO: 63 shown in Table 3). The assembly reaction was performed using the Ignite microfluidics mixing system as described above from a 10 μm stock solution of CompA-RSV-02 and a 8 μm stock solution of CompB. Standard assembly reactions were conducted by adding the stock solutions to microcentrifuge tubes at a 1:1 volume ratio using a pipette for addition and mixing. The VLP assembly reactions were evaluated by HPLC-SEC analysis and compared to CompA control (10 uM CompA-RSV-02; 0.5 mL total loading volume; R9 in FIG. 8B). As shown in FIG. 8B, the standard assembly (R10; 0.5 mL total loading volume), and assembly by the Ignite microfluidic mixing system at either 2 mL/min (R11; 1.0 mL total loading volume) or 10 mL/min (R12; 1.0 mL total loading volume) yielded assembled VLP.

[0313] For purposes of comparison, pbVLP assembly was evaluated by simple mixing. Briefly, a 10 μM stock solutions of CompA-hMPV-his or CompA-RSV-02 was added by pipette to an 8 μM solution of CompB pentamer (153-50B) at a 1:1 volume. The solution was then mixed by orbital agitation and incubated at 4° C. for 2 hours prior to analysis. The resulting mixture was evaluated by HPLC-SEC (Agilent Bio SEC-5 1000 Å column; flow rate of 0.4 mL/min; mobile phase of 25 mM NaPi+300 mM NaCl, pH 6.6). Comparison was made to a standard that was an AAV capsid with 30 nm diameter, a set of protein standards (thyroglobulin (660 kDa), IgG (150 kDa), BSA (66 kDa), and myoglobin (17 kDa)), and respective CompA protein. As shown in FIG. 9A, simple mixing provided assembled pbVLP for the CompA-RSV fusion with good yield and uniformity. However, in this case as shown in FIG. 9B, simple mixing of CompA-hMPV-his+CompB resulted in a pbVLP mixture with substantial amount of high molecular weight aggregate. Variation in the pbVLP assembly using simple mixing (i.e., pipette addition of compA to compB with mixing via orbital agitation) is avoided using microfluidic mixing of the pbVLP components.

[0314] Together, these data demonstrate that efficient pbVLP assembly is achieved using a microfluids mixing system and indicates the utility of the approach for scale-up GMP manufacturing.

[0315] While the invention has been described in connection with proposed specific embodiments thereof, it will be understood that it is capable of further modifications and this application is intended to cover any variations, uses, or adaptations of the invention following, in general, the principles of the invention and including such departures from the present disclosure as come within known or customary practice within the art to which the invention pertains and as may be applied to the essential features hereinbefore set forth and as follows in the scope of the appended claims.

What is claimed is:

1. A method of making a nanostructure, comprising adding a component A (compA) protein to a solution comprising a component B (compB) protein under conditions that minimize shear stress, thereby forming a compA:compB complex.

2. The method of claim 1, wherein the conditions that minimize shear stress comprise adding the compA protein to the compB protein under the surface of the solution.

3. The method of claim 1 or claim 2, wherein the conditions that minimize shear stress comprise mixing the solution without mechanical mixing.

4. The method of any one of claims 1-3, wherein the conditions that minimize shear stress comprise mixing the solution without a stir bar.

5. The method of any one of claims 1-4, wherein the conditions that minimize shear stress comprise mixing the solution without an impeller.

6. The method of any one of claims 1-5, wherein the conditions that minimize shear stress comprise mixing the solution using an orbital agitation.

7. The method of any one of claims 1-6, wherein the conditions that minimize shear stress comprise mixing the solution using a microfluidic mixer.

8. The method of any one of claim 1-7, wherein the method comprising adding the compA protein in excess to the compB protein.

9. The method of any one of claims 1-8, wherein the conditions provide for mixing of compA and compB without substantial precipitation, optionally relative to mechanical mixing of a solution of compA and compB.

10. The method of any one of claims 1-9, wherein the compA:compB complex is formed in an amount that is at least about 40% of total protein, optionally as measured by size exclusion chromatography.

11. The method of any one of claims 1-10, wherein the method further comprises purifying the compA:compB complex from excess compA, excess compB, and/or other impurities by filtering the solution with a 1,000 kDa membrane or an equivalent thereof.

12. The method of claim 11, wherein the 1,000 kDa membrane is a composite regenerated cellulose (CRC) membrane.

13. The method of claim 12, wherein the 1,000 kDa membrane is Ultracel® 1000 kDa Membrane or an equivalent thereof.

14. The method of any one of claims 11-13, wherein the filtering comprises tangential flow filtration (TFF).

15. The method of any one of claims 11-14, wherein the purifying provides the compA:compB complex with purity of about 80% or higher as measured by percent weight of total protein.

16. The method of any one of claim 1-15, wherein the method does not comprise purifying the solution with a hydrophobic membrane (e.g., Pellicon Biomax 1000 kDa), a Butyl Convective Interaction Media (CIM) column, a Captocore700 column, or an equivalent thereto.

17. The method of any one of claims 1-16, wherein the method is a continuous or semi-continuous process.

18. The method of any one of claims 1-17, wherein the compA protein is continuously produced prior to the adding step.

19. The method of any one of claims 1-18, wherein the compB protein is provided as one or more frozen batches.

20. A method of making a nanostructure, comprising (i) providing a first inlet fluid stream comprising a first protein and a second inlet fluid stream comprising a second protein, and (ii) contacting the first inlet fluid stream and the second inlet fluid stream to form an outlet stream, wherein mixing of the first protein and the second protein occurs in the outlet stream, thereby forming a protein complex comprises the first protein and the second protein.

21. The method of claim 20, wherein the first inlet fluid stream and the second inlet fluid stream are joined in a three-way configuration to form the outlet stream, optionally wherein the three-way configuration is a T-shaped or Y-shaped configuration.

22. The method of claim 20 or 21, wherein the first inlet fluid stream and the second inlet fluid stream are joined to form the outlet stream using a microfluidic mixer, optionally wherein the microfluidic mixer is a Nanoassembler® Ignite™ cartridge or any equivalent thereof.

23. The method of claim 22, wherein the microfluidic mixer comprises one or more passive mixing elements to facilitate mixing of the first protein and the second protein.

24. The method of any one of claims 20-23, wherein the outlet stream comprises a molar concentration of the first protein that exceeds the molar concentration of the second protein.

25. The method of any one of claims 20-23, wherein the outlet stream comprises a molar concentration of the first protein that is substantially equivalent to the molar concentration of the second protein.

26. The method of any one of claims 20-25, wherein the mixing of the first protein and the second protein occurs without substantial precipitation of the first protein, the second protein, the complex, or a combination thereof.

27. The method of any one of claims 20-26, wherein the complex is formed in an amount that is at least about 40% of total protein, optionally as measured by size exclusion chromatography.

28. The method of any one of claims 20-27, wherein the method further comprises purifying the complex from excess second protein, and/or other impurities by filtering the solution with a 1,000 kDa membrane or an equivalent thereof.

29. The method of claim 28, wherein the 1,000 kDa membrane is a composite regenerated cellulose (CRC) membrane.

30. The method of claim 29, wherein the 1,000 kDa membrane is Ultracel® 1000 kDa Membrane or an equivalent thereof.

31. The method of any one of claims 28-30, wherein the filtering comprises tangential flow filtration (TFF).

32. The method of any one of claims 28-31, wherein the purifying provides the complex with purity of about 90% or higher as measured by percent weight of total protein.

33. The method of any one of claim 20-32, wherein the method does not comprise purifying the solution with a hydrophobic membrane (e.g., Pellicon Biomax 1000 kDa), a Butyl Convective Interaction Media (CIM) column, a Captocore700 column, or an equivalent thereto.

34. The method of any one of claims 20-33, wherein the method is a continuous or semi-continuous process.

35. The method of any one of claims 20-34, wherein the first protein is continuously produced prior to the adding step.

36. The method of any one of claims 20-35, wherein the second protein is provided as one or more frozen batches.

37. The method of any one of claims 20-36, wherein the first component is a component A (compA) and/or the first component is a component B (compB).

38. The method of any one of claim 1-19 or 37, wherein the compA comprises a polypeptide sequence that has at least 90%, at least 95%, at least 99%, or 100% identity to any one of SEQ IN NOs: 1, 3, 5, 7, 9, 11, 13, 15, 17, 19, 21, 23, 25, 26, 29-31, 35, 37, 39, 41, 43, 45, 47, 49, 51, 53, 55, 57, and 59.

39. The method of any one of claim 1-19 or 37-38, wherein the compB comprises a polypeptide sequence that has at least 90%, at least 95%, at least 99%, or 100% identity to any one of SEQ IN NOs: 2, 4, 6, 8, 10, 12, 14, 16, 18, 20, 22, 24, 27, 28, 32-34, 36, 38, 40, 42, 44, 46, 48, 50, 52, 54, 56, and 58.

40. The method of any one of claim 1-19, or 37, wherein the compA and the compB each comprise a polypeptide sequence that has at least 90%, at least 95%, at least 99%, or 100% identity to any one of
(i) SEQ ID NO:1 and SEQ ID NO:2 respectively;
(ii) SEQ ID NO:3 and SEQ ID NO:4 respectively;
(iii) SEQ ID NO:3 and SEQ ID NO:24 respectively;
(iv) SEQ ID NO:23 and SEQ ID NO:4 respectively;
(v) SEQ ID NO:35 and SEQ ID NO:36 respectively;
(vi) SEQ ID NO:5 and SEQ ID NO:6 respectively;
(vii) SEQ ID NO:5 and SEQ ID NO:27 respectively;
(viii) SEQ ID NO:5 and SEQ ID NO:28 respectively;
(ix) SEQ ID NO:25 and SEQ ID NO:6 respectively;
(x) SEQ ID NO:25 and SEQ ID NO:27 respectively;
(xi) SEQ ID NO:25 and SEQ ID NO:28 respectively;
(xii) SEQ ID NO:26 and SEQ ID NO:6 respectively;
(xiii) SEQ ID NO:26 and SEQ ID NO:27 respectively;
(xiv) SEQ ID NO:26 and SEQ ID NO:28 respectively;
(xv) SEQ ID NO:37 and SEQ ID NO:38 respectively;
(xvi) SEQ ID NO:7 and SEQ ID NO:8 respectively;
(xvii) SEQ ID NO:7 and SEQ ID NO:32 respectively;
(xviii) SEQ ID NO:7 and SEQ ID NO:33 respectively;
(xix) SEQ ID NO:7 and SEQ ID NO:34 respectively;
(xx) SEQ ID NO:29 and SEQ ID NO:8 respectively;
(xxi) SEQ ID NO:29 and SEQ ID NO:32 respectively;
(xxii) SEQ ID NO:29 and SEQ ID NO:33 respectively;
(xxiii) SEQ ID NO:29 and SEQ ID NO:34 respectively;
(xxiv) SEQ ID NO:30 and SEQ ID NO:8 respectively;
(xxv) SEQ ID NO:30 and SEQ ID NO:32 respectively;
(xxvi) SEQ ID NO:30 and SEQ ID NO:33 respectively;
(xxvii) SEQ ID NO:30 and SEQ ID NO:34 respectively;
(xxviii) SEQ ID NO:31 and SEQ ID NO:8 respectively;
(xxix) SEQ ID NO:31 and SEQ ID NO:32 respectively;
(xxx) SEQ ID NO:31 and SEQ ID NO:33 respectively;
(xxxi) SEQ ID NO:31 and SEQ ID NO:34 respectively;
(xxxii) SEQ ID NO:39 and SEQ ID NO:40 respectively;
(xxxiii) SEQ ID NO:9 and SEQ ID NO:10 respectively;
(xxxiv) SEQ ID NO:11 and SEQ ID NO:12 respectively;
(xxxv) SEQ ID NO:13 and SEQ ID NO:14 respectively;
(xxxvi) SEQ ID NO:15 and SEQ ID NO:16 respectively;
(xxxvii) SEQ ID NO:19 and SEQ ID NO:20 respectively;
(xxxviii) SEQ ID NO:21 and SEQ ID NO:22 respectively;
(xxxix) SEQ ID NO:23 and SEQ ID NO:24 respectively;
(xl) SEQ ID NO:41 and SEQ ID NO:42 respectively;
(xli) SEQ ID NO:43 and SEQ ID NO:44 respectively;
(xlii) SEQ ID NO:45 and SEQ ID NO:46 respectively;
(xliii) SEQ ID NO:47 and SEQ ID NO:48 respectively;
(xliv) SEQ ID NO:49 and SEQ ID NO:50 respectively;
(xlv) SEQ ID NO:51 and SEQ ID NO:44 respectively;
(xlvi) SEQ ID NO:53 and SEQ ID NO:52 respectively;
(xlvii) SEQ ID NO:55 and SEQ ID NO:54 respectively;
(xlviii) SEQ ID NO:57 and SEQ ID NO:56 respectively; and
(xlix) SEQ ID NO:59 and SEQ ID NO:58 respectively.

41. The method of any one of claim 1-19 or 37-40, wherein the compA protein is linked to an antigenic protein, optionally via a linker, thereby forming a fusion protein.

42. The method of claim 41, wherein the antigenic protein is selected from HIV Env, RSV F, EBV gp350, CMV gB, CMV UL128, CMV UL130, CMV UL131A, CMV gH, CMV gL, Lyme OspA, Pertussis toxin, Dengue E, SARS S, MERS S, Zaire ebolavirus GP, Sudan ebolavirus GP, Marburg virus GP, Hanta virus Gn, Hanta virus Gc, HepB surface antigen, Measles H, Zika envelope domain III, Malaria CSP, Malaria Pfs25, Nipah virus F, Nipah virus G, Rotavirus VP4, Rotavirus VP8*, hMPV F, hMPV G, PV F, PV HN, MenB fHbp, MenB NadA, coronavirus S protein, coronavirus RBD, and MenB NHBA.

43. The method of claim 41 or 42, wherein the antigenic protein comprises a paramyxovirus and/or penumovirus F protein or an antigenic fragment thereof, optionally a respiratory syncytial virus (RSV) F protein or antigenic fragment thereof, or a human metapneumovirus (hMPV) F protein or an antigenic fragment thereof.

44. The method of claim 41, wherein the antigenic protein comprises a polypeptide comprising an amino acid sequence selected from SEQ ID NOs: 64-136 and 206-209.

45. The method of any one of claims 41-43, wherein the compA protein is linked to the antigenic protein via a peptide linker.

46. The method of claim 45, wherein the peptide linker is a Gly-Ser linker, optionally wherein the Gly-Ser linker is any one of SEQ ID NOs: 213-215.

47. The method of claim 41, wherein the fusion protein comprises an amino acid sequence having at least about 80%, about 85%, about 90%, about 91%, about 92%, about 93%, about 94%, about 95%, about 96%, about 97%, about 98%, about 99%, or about 100% identity to a polypeptide selected from SEQ ID NOs: 137-205.

48. A method of making a nanostructure, comprising adding a fusion protein to a solution comprising a component B (compB) protein under conditions that minimize shear stress, wherein the fusion protein comprises a compA protein linked to an antigenic protein, thereby forming a compA:compB complex.

49. A method of making a nanostructure, comprising adding a fusion protein to a solution comprising a component B (compB) protein under conditions that minimize shear stress, wherein the fusion protein comprises a compA protein linked to an antigenic protein, and wherein the fusion protein comprises an amino acid sequence having at least about 80%, about 85%, about 90%, about 91%, about 92%, about 93%, about 94%, about 95%, about 96%, about 97%, about 98%, about 99%, or about 100% identity to a polypeptide selected from SEQ ID NOs: 137-205, thereby forming a compA:compB complex.

50. The method of any one of claims 1-49, wherein the complex has icosahedral symmetry.

51. A complex produced by the method of any one of claims 1-49.

52. A pharmaceutical composition comprises the complex of claim 51 and a pharmaceutically acceptable diluent.

53. A vaccine comprises the complex of claim 51.

54. A method of treating or preventing a disease or disorder in a subject in need thereof, comprising administering an effective amount of the complex of claim 51, the pharmaceutical composition of claim 52, or the vaccine of claim 53 to the subject.

55. The method of claim 54, wherein the disease or disorder is a viral infection.

56. A method of generating an immune response in a subject in need thereof, comprising administering an effective amount of the complex of claim 51, the pharmaceutical composition of claim 52, or the vaccine of claim 53 to the subject.

57. A kit comprising the complex of claim 51, the pharmaceutical composition or claim 52, or the vaccine of claim 53.

58. Use of the complex of claim 51, the pharmaceutical composition of claim 52, or the vaccine of claim 53 for the method of any one of claims 54-56 or as a medicament.

59. The complex of claim 51, the pharmaceutical composition of claim 52, or the vaccine of claim 53 for use in the method of any one of claims 54-56 or as a medicament.

The application's sequence listing, which the Patent Office published only in electronic form, follows.

SEQUENCE LISTING (216 sequences)

SEQ ID NO: 1 - protein, 206 aa, Artificial Sequence
  Synthetic Peptide
EGMDPLAVLAESRLLPLLTVRGGEDLAGLATVLELMGVGALEITLRTEKGLEALKALRKSGLLLGAGTVRSPKEAEAALEAGAAFLVSPGLLEEVAALAQARGVPYLPGVLTPTEVERALALGLSALKFFPAEPFQGVRVLRAYAEVFPEVRFLPTGGIKEEHLPHYAALPNLLAVGGSWLLQGDLAAVMKKVKAAKALLSPQAPG

SEQ ID NO: 2 - protein, 155 aa, Artificial Sequence
  Synthetic Peptide
TKKVGIVDTTFARVDMAEAAIRTLKALSPNIKIIRKTVPGIKDLPVACKKLLEEEGCDIVMALGMPGKAEKDKVCAHEASLGLMLAQLMTNKHIIEVFVHEDEAKDDDELDILALVRAIEHAANVYYLLFKPEYLTRMAGKGLRQGREDAGPARE

SEQ ID NO: 3 - protein, 155 aa, Artificial Sequence
  Synthetic Peptide
TKKVGIVDTTFARVDMASAAILTLKMESPNIKIIRKTVPGIKDLPVACKKLLEEEGCDIVMALGMPGKAEKDKVCAHEASLGLMLAQLMTNKHIIEVFVHEDEAKDDAELKILAARRAIEHALNVYYLLFKPEYLTRMAGKGLRQGFEDAGPARE

SEQ ID NO: 4 - protein, 208 aa, Artificial Sequence
  Synthetic Peptide
STINNQLKALKVIPVIAIDNAEDIIPLGKVLAENGLPAAEITFRSSAAVKAIMLLRSAQPEMLIGAGTILNGVQALAAKEAGATFVVSPGFNPNTVRACQIIGIDIVPGVNNPSTVEAALEMGLTTLKFFPAEASGGISMVKSLVGPYGDIRLMPTGGITPSNIDNYLAIPQVLACGGTWMVDKKLVTNGEWDEIARLTREIVEQVNP

SEQ ID NO: 5 - protein, 113 aa, Artificial Sequence
  Synthetic Peptide
PIFTLNTNIKATDVPSDFLSLTSRLVGLILSKPGSYVAVHINTDQQLSFGGSTNPAAFGTLMSIGGIEPSKNRDHSAVLFDHLNAMLGIPKNRMYIHFVNLNGDDVGWNGTTF

SEQ ID NO: 6 - protein, 156 aa, Artificial Sequence
  Synthetic Peptide
NQHSHKDYETVRIAVVRARWHADIVDACVEAFEIAMAAIGGDRFAVDVFDVPGAYEIPLHARTLAETGRYGAVLGTAFVVNGGIYRHEFVASAVIDGMMNVQLSTGVPVLSAVLTPHRYRDSAEHHRFFAAHFAVKGVEAARACIEILAAREKIAA

SEQ ID NO: 7 - protein, 203 aa, Artificial Sequence
  Synthetic Peptide
MEELFKKHKIVAVLRANSVEEAIEKAVAVFAGGVHLIEITFTVPDADTVIKALSVLKEKGAIIGAGTVTSVEQCRKAVESGAEFIVSPHLDEEISQFCKEKGVFYMPGVMTPTELVKAMKLGHTILKLFPGEVVGPQFVKAMKGPFPNVKFVPTGGVNLDNVCEWFKAGVLAVGVGSALVKGTPDEVREKAKAFVEKIRGCTE

SEQ ID NO: 8 - protein, 156 aa, Artificial Sequence
  Synthetic Peptide
NQHSHKDYETVRIAVVRARWHAEIVDACVSAFEAAMADIGGDRFAVDVFDVPGAYEIPLHARTLAETGRYGAVLGTAFVVNGGIYRHEFVASAVIDGMMNVQLSTGVPVLSAVLTPHRYRDSDAHTLLFLALFAVKGMEAARACVEILAAREKIAA

SEQ ID NO: 9 - protein, 176 aa, Artificial Sequence
  Synthetic Peptide
FTKSGDDGNTNVINKRVGKDSPLVNFLGDLDELNSFIGFAISKIPWEDMKKDLERVQVELFEIGEDLSTQSSKKKIDESYVLWLLAATAIYRIESGPVKLFVIPGGSEEASVLHVTRSVARRVERNAVKYTKELPEINRMIIVYLNRLSSLLFAMALVANKRRNQSEKIYEIGKSW

SEQ ID NO: 10 - protein, 156 aa, Artificial Sequence
  Synthetic Peptide
NQHSHKDYETVRIAVVRARWHADIVDQCVRAFEEAMADAGGDRFAVDVFDVPGAYEIPLHARTLAETGRYGAVLGTAFVVNGGIYRHEFVASAVIDGMMNVQLSTGVPVLSAVLTPHRYRSSREHHEFFREHFMVKGVEAAAACITILAAREKIAA

SEQ ID NO: 11 - protein, 200 aa, Artificial Sequence
  Synthetic Peptide
GHTKGPTPQQHDGSALRIGIVHARWNKTIIMPLLIGTIAKLLECGVKASNIVVQSVPGSWELPIAVQRLYSASQLQTPSSGPSLSAGDLLGSSTTDLTALPTTTASSTGPFDALIAIGVLIKGETMHFEYIADSVSHGLMRVQLDTGVPVIFGVLTVLTDDQAKARAGVIEGSHNHGEDWGLAAVEMGVRRRDWAAGKTE

SEQ ID NO: 12 - protein, 236 aa, Artificial Sequence
  Synthetic Peptide
YEVDHADVYDLFYLGRGKDYAAEASDIADLVRSRTPEASSLLDVACGTGTHLEHFTKEFGDTAGLELSEDMLTHARKRLPDATLHQGDMRDFQLGRKFSAVVSMFSSVGYLKTVAELGAAVASFAEHLEPGGVVVVEPWWFPETFADGWVSADVVRRDGRTVARVSHSVREGNATRMEVHFTVADPGKGVRHFSDVHLITLFHQREYEAAFMAAGLRVEYLEGGPSGRGLFVGVPA

SEQ ID NO: 13 - protein, 137 aa, Artificial Sequence
  Synthetic Peptide
GMKEKFVLIITHGDFGKGLLSGAEVIIGKQENVHTVGLNLGDNIEKVAKEVMRIIIAKLAEDKEIIIVVDLFGGSPFNIALEMMKTFDVKVITGINMPMLVELLTSINVYDTTELLENISKIGKDGIKVIEKSSLKM

SEQ ID NO: 14 - protein, 153 aa, Artificial Sequence
  Synthetic Peptide
KYDGSKLRIGILHARWNLEIIAALVAGAIKRLQEFGVKAENIIIETVPGSFELPYGSKLFVEKQKRLGKPLDAIIPIGVLIKGSTMHFEYICDSTTHQLMKLNFELGIPVIFGVLTCLTDEQAEARAGLIEGKMHNHGEDWGAAAVEMATKFN

SEQ ID NO: 15 - protein, 163 aa, Artificial Sequence
  Synthetic Peptide
AVKGLGEVDQKYDGSKLRIGILHARWNRKIILALVAGAVLRLLEFGVKAENIIIETVPGSFELPYGSKLFVEKQKRLGKPLDAIIPIGVLIKGSTMHFEYICDSTTHQLMKLNFELGIPVIFGVLTCLTDEQAEARAGLIEGKMHNHGEDWGAAAVEMATKFN

SEQ ID NO: 16 - protein, 174 aa, Artificial Sequence
  Synthetic Peptide
GANWYLDNESSRLSFTSTKNADIAEVHRFLVLHGKVDPKGLAEVEVETESISTGIPLRDMLLRVLVFQVSKFPVAQINAQLDMRPINNLAPGAQLELRLPLTVSLRGKSHSYNAELLATRLDERRFQVVTLEPLVIHAQDFDMVRAFNALRLVAGLSAVSLSVPVGAVLIFTAR

SEQ ID NO: 17 - protein, 207 aa, Artificial Sequence
  Synthetic Peptide
TDYIRDGSAIKALSFAIILAEADLRHIPQDLQRLAVRVIHACGMVDVANDLAFSEGAGKAGRNALLAGAPILCDARMVAEGITRSRLPADNRVIYTLSDPSVPELAKKIGNTRSAAALDLWLPHIEGSIVAIGNAPTALFRLFELLDAGAPKPALIIGMPVGFVGAAESKDELAANSRGVPYVIVRGRRGGSAMTAAAVNALASERE

SEQ ID NO: 18 - protein, 127 aa, Artificial Sequence
  Synthetic Peptide
ITVFGLKSKLAPRREKLAEVIYSSLHLGLDIPKGKHAIRFLCLEKEDFYYPFDRSDDYTVIEINLMAGRSEETKMLLIFLLFIALERKLGIRAHDVEITIKEQPAHCWGFRGRTGDSARDLDYDIYV

SEQ ID NO: 19 - protein, 234 aa, Artificial Sequence
  Synthetic Peptide
GSDLQKLQRFSTCDISDGLLNVYNIPTGGYFPNLTAISPPQNSSIVGTAYTVLFAPIDDPRPAVNYIDSVPPNSILVLALEPHLQSQFHPFIKITQAMYGGLMSTRAQYLKSNGTVVFGRIRDVDEHRTLNHPVFAYGVGSCAPKAVVKAVGTNVQLKILTSDGVTQTICPGDYIAGDNNGIVRIPVQETDISKLVTYIEKSIEVDRLVSEAIKNGLPAKAAQTARRMVLKDYI

SEQ ID NO: 20 - protein, 161 aa, Artificial Sequence
  Synthetic Peptide
SGMRVYLGADHAGYELKQAIIAFLKMTGHEPIDCGALRYDADDDYPAFCIAAATRTVADPGSLGIVLGGSGNGEQIAANKVPGARCALAWSVQTAALAREHNNAQLIGIGGRMHTLEEALRIVKAFVTTPWSKAQRHQRRIDILAEYERTHEAPPVPGAPA

SEQ ID NO: 21 - protein, 156 aa, Artificial Sequence
  Synthetic Peptide
GDDARIAAIGDVDELNSQIGVLLAEPLPDDVRAALSAIQHDLFDLGGELCIPGHAAITEDHLLRLALWLVHYNGQLPPLEEFILPGGARGAALAHVCRTVCRRAERSIKALGASEPLNIAPAAYVNLLSDLLFVLARVLNRAAGGADVLWDRTRAH

SEQ ID NO: 22 - protein, 156 aa, Artificial Sequence
  Synthetic Peptide
ILSAEQSFTLRHPHGQAAALAFVREPAAALAGVQRLRGLDSDGEQVWGELLVRVPLLGEVDLPFRSEIVRTPQGAELRPLTLTGERAWVAVSGQATAAEGGEMAFAFQFQAHLATPEAEGEGGAAFEVMVQAAAGVTLLLVAMALPQGLAAGLPPA

SEQ ID NO: 23 - protein, 155 aa, Artificial Sequence
  Synthetic Peptide
TKKVGIVDTTFARVDMASAAILTLKMESPNIKIIRKTVPGIKDLPVACKKLLEEEGCDIVMALGMPGKKEKDKVCAHEASLGLMLAQLMTNKHIIEVFVHEDEAKDDAELKILAARRAIEHALNVYYLLFKPEYLTRMAGKGLRQGFEDAGPARE

SEQ ID NO: 24 - protein, 208 aa, Artificial Sequence
  Synthetic Peptide
DDINNQLKRLKVIPVIAIDNAEDIIPLGKVLAENGLPAAEITFRSSAAVKAIMLLRSAQPEMLIGAGTILNGVQALAAKEAGADFVVSPGFNPNTVRACQIIGIDIVPGVNNPSTVEQALEMGLTTLKFFPAEASGGISMVKSLVGPYGDIRLMPTGGITPDNIDNYLAIPQVLACGGTWMVDKKLVRNGEWDEIARLTREIVEQVNP

SEQ ID NO: 25 - protein, 113 aa, Artificial Sequence
  Synthetic Peptide
PIFTLNTNIKADDVPSDFLSLTSRLVGLILSKPGSYVAVHINTDQQLSFGGSTNPAAFGTLMSIGGIEPDKNRDHSAVLFDHLNAMLGIPKNRMYIHFVNLNGDDVGWNGTTF

SEQ ID NO: 26 - protein, 113 aa, Artificial Sequence
  Synthetic Peptide
PIFTLNTNIKADDVPSDFLSLTSRLVGLILSEPGSYVAVHINTDQQLSFGGSTNPAAFGTLMSIGGIEPDKNEDHSAVLFDHLNAMLGIPKNRMYIHFVDLDGDDVGWNGTTF

SEQ ID NO: 27 - protein, 156 aa, Artificial Sequence
  Synthetic Peptide
NQHSHKDHETVRIAVVRARWHADIVDACVEAFEIAMAAIGGDRFAVDVFDVPGAYEIPLHARTLAETGRYGAVLGTAFVVNGGIYRHEFVASAVIDGMMNVQLDTGVPVLSAVLTPHRYRDSDEHHRFFAAHFAVKGVEAARACIEILNAREKIAA

SEQ ID NO: 28 - protein, 156 aa, Artificial Sequence
  Synthetic Peptide
NQHSHKDHETVRIAVVRARWHADIVDACVEAFEIAMAAIGGDRFAVDVFDVPGAYEIPLHARTLAETGRYGAVLGTAFVVDGGIYDHEFVASAVIDGMMNVQLDTGVPVLSAVLTPHEYEDSDEDHEFFAAHFAVKGVEAARACIEILNAREKIAA

SEQ ID NO: 29 - protein, 202 aa, Artificial Sequence
  Synthetic Peptide
EELFKKHKIVAVLRANSVEEAIEKAVAVFAGGVHLIEITFTVPDADTVIKALSVLKEKGAIIGAGTVTSVEQCRKAVESGAEFIVSPHLDEEISQFCKEKGVFYMPGVMTPTELVKAMKLGHDILKLFPGEVVGPQFVKAMKGPFPNVKFVPTGGVNLDNVCEWFKAGVLAVGVGDALVKGDPDEVREKAKKFVEKIRGCTE

SEQ ID NO: 30 - protein, 202 aa, Artificial Sequence
  Synthetic Peptide
EELFKKHKIVAVLRANSVEEAIEKAVAVFAGGVHLIEITFTVPDADTVIKALSVLKEKGAIIGAGTVTSVEQCRKAVESGAEFIVSPHLDEEISQFCKEKGVFYMPGVMTPTELVKAMKLGHDILKLFPGEVVGPEFVEAMKGPFPNVKFVPTGGVDLDDVCEWFDAGVLAVGVGDALVEGDPDEVREDAKEFVEEIRGCTE

SEQ ID NO: 31 - protein, 202 aa, Artificial Sequence
  Synthetic Peptide
EELFKKHKIVAVLRANSVEEAIEKAVAVFAGGVHLIEITFTVPDADTVIKALSVLKEKGAIIGAGTVTSVEQCRKAVESGAEFIVSPHLDEEISQFCKEKGVFYMPGVMTPTELVKAMKLGHDILKLFPGEVVGPQFVKAMKGPFPNVKFVPTGGVNLDNVCKWFKAGVLAVGVGKALVKGKPDEVREKAKKFVKKIRGCTE

SEQ ID NO: 32 - protein, 156 aa, Artificial Sequence
  Synthetic Peptide
NQHSHKDHETVRIAVVRARWHAEIVDACVSAFEAAMRDIGGDRFAVDVFDVPGAYEIPLHARTLAETGRYGAVLGTAFVVNGGIYRHEFVASAVIDGMMNVQLDTGVPVLSAVLTPHRYRDSDAHTLLFLALFAVKGMEAARACVEILAAREKIAA

SEQ ID NO: 33 - protein, 156 aa, Artificial Sequence
  Synthetic Peptide
NQHSHKDHETVRIAVVRARWHAEIVDACVSAFEAAMRDIGGDRFAVDVFDVPGAYEIPLHARTLAETGRYGAVLGTAFVVDGGIYDHEFVASAVIDGMMNVQLDTGVPVLSAVLTPHEYEDSDADTLLFLALFAVKGMEAARACVEILAAREKIAA

SEQ ID NO: 34 - protein, 156 aa, Artificial Sequence
  Synthetic Peptide
NQHSHKDHETVRIAVVRARWHAEIVDACVSAFEAAMRDIGGDRFAVDVFDVPGAYEIPLHARTLAETGRYGAVLGTAFVVNGGIYRHEFVASAVINGMMNVQLNTGVPVLSAVLTPHNYDKSKAHTLLFLALFAVKGMEAARACVEILAAREKIAA

SEQ ID NO: 35 - protein, 155 aa, Artificial Sequence
  Synthetic Peptide
  VARIANT (69)..(69): Xaa is A or K
TKKVGIVDTTFARVDMASAAILTLKMESPNIKIIRKTVPGIKDLPVACKKLLEEEGCDIVMALGMPGKXEKDKVCAHEASLGLMLAQLMTNKHIIEVFVHEDEAKDDAELKILAARRAIEHALNVYYLLFKPEYLTRMAGKGLRQGFEDAGPARE

SEQ ID NO: 36 - protein, 208 aa, Artificial Sequence
  Synthetic Peptide
  VARIANT (1)..(1): Xaa is S or D
  VARIANT (2)..(2): Xaa is T or D
  VARIANT (9)..(9): Xaa is A or R
  VARIANT (84)..(84): Xaa is T or D
  VARIANT (118)..(118): Xaa is A or Q
  VARIANT (162)..(162): Xaa is S or D
  VARIANT (188)..(188): Xaa is T or R
XXINNQLKXLKVIPVIAIDNAEDIIPLGKVLAENGLPAAEITFRSSAAVKAIMLLRSAQPEMLIGAGTILNGVQALAAKEAGAXFVVSPGFNPNTVRACQIIGIDIVPGVNNPSTVEXALEMGLTTLKFFPAEASGGISMVKSLVGPYGDIRLMPTGGITPXNIDNYLAIPQVLACGGTWMVDKKLVXNGEWDEIARLTREIVEQVNP

SEQ ID NO: 37 - protein, 113 aa, Artificial Sequence
  Synthetic Peptide
  VARIANT (12)..(12): Xaa is T or D
  VARIANT (32)..(32): Xaa is K or E
  VARIANT (70)..(70): Xaa is S or D
  VARIANT (73)..(73): Xaa is R or E
  VARIANT (100)..(100): Xaa is N or D
  VARIANT (102)..(102): Xaa is N or D
PIFTLNTNIKAXDVPSDFLSLTSRLVGLILSXPGSYVAVHINTDQQLSFGGSTNPAAFGTLMSIGGIEPXKNXDHSAVLFDHLNAMLGIPKNRMYIHFVXLXGDDVGWNGTTF

SEQ ID NO: 38 - protein, 156 aa, Artificial Sequence
  Synthetic Peptide
  VARIANT (8)..(8): Xaa is Y or H
  VARIANT (81)..(81): Xaa is N or D
  VARIANT (86)..(86): Xaa is R or D
  VARIANT (104)..(104): Xaa is S or D
  VARIANT (118)..(118): Xaa is R or E
  VARIANT (120)..(120): Xaa is R or E
  VARIANT (123)..(123): Xaa is A or D
  VARIANT (125)..(125): Xaa is H or D
  VARIANT (127)..(127): Xaa is R or E
  VARIANT (149)..(149): Xaa is A or N
NQHSHKDXETVRIAVVRARWHADIVDACVEAFEIAMAAIGGDRFAVDVFDVPGAYEIPLHARTLAETGRYGAVLGTAFVVXGGIYXHEFVASAVIDGMMNVQLXTGVPVLSAVLTPHXYXDSXEXHXFFAAHFAVKGVEAARACIEILXAREKIAA

SEQ ID NO: 39 - protein, 202 aa, Artificial Sequence
  Synthetic Peptide
  VARIANT (123)..(123): Xaa is T or D
  VARIANT (136)..(136): Xaa is Q or E
  VARIANT (139)..(139): Xaa is K or E
  VARIANT (157)..(157): Xaa is N or D
  VARIANT (160)..(160): Xaa is N or D
  VARIANT (163)..(163): Xaa is E or K
  VARIANT (166)..(166): Xaa is D or K
  VARIANT (176)..(176): Xaa is S, D or K
  VARIANT (180)..(180): Xaa is K or E
  VARIANT (182)..(182): Xaa is T, D, or K
  VARIANT (189)..(189): Xaa is D or K
  VARIANT (192)..(192): Xaa is A, E, or K
  VARIANT (195)..(195): Xaa is E or K
  VARIANT (196)..(196): Xaa is E or K
EELFKKHKIVAVLRANSVEEAIEKAVAVFAGGVHLIEITFTVPDADTVIKALSVLKEKGAIIGAGTVTSVEQCRKAVESGAEFIVSPHLDEEISQFCKEKGVFYMPGVMTPTELVKAMKLGHXILKLFPGEVVGPXFVXAMKGPFPNVKFVPTGGVXLDXVCXWFXAGVLAVGVGXALVXGXPDEVREXAKXFVXXIRGCTE

SEQ ID NO: 40 - protein, 156 aa, Artificial Sequence
  Synthetic Peptide
  VARIANT (8)..(8): Xaa is Y or H
  VARIANT (37)..(37): Xaa is A or R
  VARIANT (81)..(81): Xaa is N or D
  VARIANT (86)..(86): Xaa is R or D
  VARIANT (96)..(96): Xaa is N or D
  VARIANT (104)..(104): Xaa is S, N, or D
  VARIANT (118)..(118): Xaa is R, E, or N
  VARIANT (120)..(120): Xaa is R, E, or D
  VARIANT (121)..(121): Xaa is K or D
  VARIANT (123)..(123): Xaa is K or D
  VARIANT (125)..(125): Xaa is H or D
NQHSHKDXETVRIAVVRARWHAEIVDACVSAFEAAMXDIGGDRFAVDVFDVPGAYEIPLHARTLAETGRYGAVLGTAFVVXGGIYXHEFVASAVIXGMMNVQLXTGVPVLSAVLTPHXYXXSXAXTLLFLALFAVKGMEAARACVEILAAREKIAA

SEQ ID NO: 41 - protein, 158 aa, Artificial Sequence
  Synthetic Peptide
GEVPIGDPKELNGMEIAAVYLQPIEMEPRGIDLAASLADIHLEADIHALKNNPNGFPEGFWMPYLTIAYALANADTGAIKTGTLMPMVADDGPHYGANIAMEKDKKGGFGVGTYALTFLISNPEKQGFGRHVDEETGVGKWFEPFVVTYFFKYTGTPK

SEQ ID NO: 42 - protein, 183 aa, Artificial Sequence
  Synthetic Peptide
SQAIGILELTSIAKGMELGDAMLKSANVDLLVSKTISPGKFLLMLGGDIGAIQQAIETGTSQAGEMLVDSLVLANIHPSVLPAISGLNSVDKRQAVGIVETWSVAACISAADLAVKGSNVTLVRVHMAFGIGGKCYMVVAGDVLDVAAAVATASLAAGAKGLLVYASIIPRPHEAMWRQMVEG

SEQ ID NO: 43 - protein, 102 aa, Artificial Sequence
  Synthetic Peptide
EEVVLITVPSALVAVKIAHALVEERLAACVNIVPGLTSIYRWQGSVVSDHELLLLVKTTTHAFPKLKERVKALHPYTVPEIVALPIAEGNREYLDWLRENTG

SEQ ID NO: 44 - protein, 121 aa, Artificial Sequence
  Synthetic Peptide
VRGIRGAITVEEDTPAAILAATIELLLKMLEANGIQSYEELAAVIFTVTEDLTSAFPAEAARLIGMHRVPLLSAREVPVPGSLPRVIRVLALWNTDTPQDRVRHVYLNEAVRLRPDLESAQ

SEQ ID NO: 45 - protein, 176 aa, Artificial Sequence
  Synthetic Peptide
SKAKIGIVTVSDRASAGITADISGKAIILALNLYLTSEWEPIYQVIPDEQDVIETTLIKMADEQDCCLIVTTGGTGPAKRDVTPEATEAVCDRMMPGFGELMRAESLKEVPTAILSRQTAGLRGDSLIVNLPGDPASISDCLLAVFPAIPYCIDLMEGPYLECNEAMIKPFRPKAK

SEQ ID NO: 46 - protein, 121 aa, Artificial Sequence
  Synthetic Peptide
VRGIRGAITVNSDTPTSIIIATILLLEKMLEANGIQSYEELAAVIFTVTEDLTSAFPAEAARQIGMHRVPLLSAREVPVPGSLPRVIRVLALWNTDTPQDRVRHVYLSEAVRLRPDLESAQ

SEQ ID NO: 47 - protein, 171 aa, Artificial Sequence
  Synthetic Peptide
RITTKVGDKGSTRLFGGEEVWKDSPIIEANGTLDELTSFIGEAKHYVDEEMKGILEEIQNDIYKIMGEIGSKGKIEGISEERIAWLLKLILRYMEMVNLKSFVLPGGTLESAKLDVCRTIARRALRKVLTVTREFGIGAEAAAYLLALSDLLFLLARVIEIEKNKLKEVRS

SEQ ID NO: 48 - protein, 122 aa, Artificial Sequence
  Synthetic Peptide
PHLVIEATANLRLETSPGELLEQANKALFASGQFGEADIKSRFVTLEAYRQGTAAVERAYLHACLSILDGRDIATRTLLGASLCAVLAEAVAGGGEEGVQVSVEVREMERLSYAKRVVARQR

SEQ ID NO: 49 - protein, 157 aa, Artificial Sequence
  Synthetic Peptide
ESVNTSFLSPSLVTIRDFDNGQFAVLRIGRTGFPADKGDIDLCLDKMIGVRAAQIFLGDDTEDGFKGPHIRIRCVDIDDKHTYNAMVYVDLIVGTGASEVERETAEEEAKLALRVALQVDIADEHSCVTQFEMKLREELLSSDSFHPDKDEYYKDFL

SEQ ID NO: 50 - protein, 112 aa, Artificial Sequence
  Synthetic Peptide
PVIQTFVSTPLDHHKRLLLAIIYRIVTRVVLGKPEDLVMMTFHDSTPMHFFGSTDPVACVRVEALGGYGPSEPEKVTSIVTAAITAVCGIVADRIFVLYFSPLHCGWNGTNF

SEQ ID NO: 51 - protein, 102 aa, Artificial Sequence
  Synthetic Peptide
EEVVLITVPSALVAVKIAHALVEERLAACVNIVPGLTSIYREEGSVVSDHELLLLVKTTTDAFPKLKERVKELHPYEVPEIVALPIAEGNREYLDWLRENTG

SEQ ID NO: 52 - protein, 119 aa, Artificial Sequence
  Synthetic Peptide
NLAEKMYKAGNAMYRKGQYTIAIIAYTLALLKDPNNAEAWYNLGNAAYKKGEYDEAIEAYQKALELDPNNAEAWYNLGNAYYKQGDYDEAIEYYKKALRLDPRNVDAIENLIEAEEKQG

SEQ ID NO: 53 - protein, 119 aa, Artificial Sequence
  Synthetic peptide
EEAELAYLLGELAYKLGEYRIAIRAYRIALKRDPNNAEAWYNLGNAYYKQGDYREAIRYYLRALKLDPENAEAWYNLGNALYKQGKYDLAIIAYQAALEEDPNNAEAKQNLGNAKQKQG

SEQ ID NO: 54 - protein, 119 aa, Artificial Sequence
  Synthetic Peptide
NSAEAMYKMGNAAYKQGDYILAIIAYLLALEKDPNNAEAWYNLGNAAYKQGDYDEAIEYYQKALELDPNNAEAWYNLGNAYYKQGDYDEAIEYYEKALELDPNNAEALKNLLEAIAEQD

SEQ ID NO: 55 - protein, 187 aa, Artificial Sequence
  Synthetic Peptide
TDPLAVILYIAILKAEKSIARAKAAEALGKIGDERAVEPLIKALKDEDALVRAAAADALGQIGDERAVEPLIKALKDEEGLVRASAAIALGQIGDERAVQPLIKALTDERDLVRVAAAVALGRIGDEKAVRPLIIVLKDEEGEVREAAAIALGSIGGERVRAAMEKLAERGTGFARKVAVNYLETHK

SEQ ID NO: 56 - protein, 119 aa, Artificial Sequence
  Synthetic Peptide
EEAELAYLLGELAYKLGEYRIAIRAYRIALKRDPNNAEAWYNLGNAYYKQGDYDEAIEYYQKALELDPNNAEAWYNLGNAYYKQGDYDEAIEYYEKALELDPENLEALQNLLNAMDKQG

SEQ ID NO: 57 - protein, 279 aa, Artificial Sequence
  Synthetic Peptide
IEEVVAEMIDILAESSKKSIEELARAADNKTTEKAVAEAIEEIARLATAAIQLIEALAKNLASEEFMARAISAIAELAKKAIEAIYRLADNHTTDTFMARAIAAIANLAVTAILAIAALASNHTTEEFMARAISAIAELAKKAIEAIYRLADNHTTDKFMAAAIEAIALLATLAILAIALLASNHTTEKFMARAIMAIAILAAKAIEAIYRLADNHTSPTYIEKAIEAIEKIARKAIKAIEMLAKNITTEEYKEKAKKIIDIIRKLAKMAIKKLEDNRT

SEQ ID NO: 58 - protein, 153 aa, Artificial Sequence
  Synthetic Peptide
KYDGSKLRIGILHARWNAEIILALVLGALKRLQEFGVKRENIIIETVPGSFELPYGSKLFVEKQKRLGKPLDAIIPIGVLIKGSTMHFEYICDSTTHQLMKLNFELGIPVIFGVLTCLTDEQAEARAGLIEGKMHNHGEDWGAAAVEMATKFN

SEQ ID NO: 59 - protein, 119 aa, Artificial Sequence
  Synthetic Peptide
EEAELAYLLGELAYKLGEYRIAIRAYRIALKRDPNNAEAWYNLGNAYYKQGRYREAIEYYQKALELDPNNAEAWYNLGNAYYERGEYEEAIEYYRKALRLDPNNADAMQNLLNAKMREE

SEQ ID NO: 60 - protein, 683 aa, Artificial Sequence
  Synthetic Peptide - CompA-hMPV-his fusion construct
KKESYLEESCSTITEGYLSVLRTGWYTNVFTLEVGDVENLTCSDGPSLIKTELDLTKSALRELKTVSADQLAREEQIENPRQSRFVLGAIALGVATAAAVTAGVAIAKTIRLESEVTAIKNALKTTNEAVSTLGNGVRVLATAVRELKDFVSKNLTRAINKNKCDIDDLKMAVSFSQFNRRFLNVVRQFSDNAGITPAISLDLMTDAELARAVSNMPTSAGQIKLMLENRAMVRRKGFGILIGVYGSSVIYMVQLPIFGVIDTPCWIVKAAPSCSEKKGNYACLLREDQGWYCQNAGSTVYYPNEKDCETRGDHVFCDTAAGINVAEQSKECNINISTTNYPCKVSTGRHPISMVALSPLGALVACYKGVSCSIGSNRVGIIKQLNKGCSYITNQDADTVTIDNTVYQLSKVEGEQHVIKGRPVSSSFDPIKFPEDQFNVALDQVFENIENSQAGSGGSGSGSGGSEKAAKAEEAARKMEELFKKHKIVAVLRANSVEEAIEKAVAVFAGGVHLIEITFTVPDADTVIKALSVLKEKGAIIGAGTVTSVEQARKAVESGAEFIVSPHLDEEISQFAKEKGVFYMPGVMTPTELVKAMKLGHTILKLFPGEVVGPQFVKAMKGPFPNVKFVPTGGVNLDNVAEWFKAGVLAVGVGSALVKGTPDEVREKAKAFVEKIRGATELE

SEQ ID NO: 61 - protein, 740 aa, Artificial Sequence
  Synthetic Peptide - CompA-RSV-02 fusion construct
MELLILKANAITTILTAVTFCFASGQNITEEFYQSTCSAVSKGYLSALRTGWYTSVITIELSNIKENKCNGTDAKVKLIKQELDKYKNAVTELQLLMQSTPATNNRARRELPRFMNYTLNNAKKTNVTLSKKRKRRFLGFLLGVGSAIASGVAVCKVLHLEGEVNKIKSALLSTNKAVVSLSNGVSVLTFKVLDLKNYIDKQLLPILNKQSCSISNIETVIEFQQKNNRLLEITREFSVNAGVTTPVSTYMLTNSELLSLINDMPITNDQKKLMSNNVQIVRQQSYSIMCIIKEEVLAYVVQLPLYGVIDTPCWKLHTSPLCTTNTKEGSNICLTRTDRGWYCDNAGSVSFFPQAETCKVQSNRVFCDTMNSLTLPSEVNLCNVDIFNPKYDCKIMTSKTDVSSSVITSLGAIVSCYGKTKCTASNKNRGIIKTFSNGCDYVSNKGVDTVSVGNTLYYVNKQEGKSLYVKGEPIINFYDPLVFPSDEFDASISQVNEKINQSLAFIRKSDELLGSGGSGSGSGGSEKAAKAEEAARKMEELFKKHKIVAVLRANSVEEAIEKAVAVFAGGVHLIEITFTVPDADTVIKALSVLKEKGAIIGAGTVTSVEQCRKAVESGAEFIVSPHLDEEISQFCKEKGVFYMPGVMTPTELVKAMKLGHTILKLFPGEVVGPQFVKAMKGPFPNVKFVPTGGVNLDNVCEWFKAGVLAVGVGSALVKGTPDEVREKAKAFVEKIRGCTE

SEQ ID NO: 62 - protein, 12 aa, Artificial Sequence
  Synthetic Peptide
EKAAKAEEAARK

SEQ ID NO: 63 - protein, 157 aa, Artificial Sequence
  Synthetic Peptide
MNQHSHKDHETVRIAVVRARWHAEIVDACVSAFEAAMRDIGGDRFAVDVFDVPGAYEIPLHARTLAETGRYGAVLGTAFVVNGGIYRHEFVASAVINGMMNVQLNTGVPVLSAVLTPHNYDKSKAHTLLFLALFAVKGMEAARACVEILAAREKIAA

SEQ ID NO: 64 - protein, 462 aa, Human metapneumovirus
KESYLEESCSTITEGYLSVLRTGWYTNVFTLEVGDVENLTCADGPSLIKTELDLTKSALRELRTVSADQLAREEQIENPRRRRFVLGAIALGVATAAAVTAGVAIAKTIRLESEVTAIKNALKKTNEAVSTLGNGVRVLATAVRELKDFVSKNLTRAINKNKCDIPDLKMAVSFSQFNRRFLNVVRQFSDNAGITPAISLDLMTDAELARAVSNMPTSAGQIKLMLENRAMVRRKGFGFLIGVYGSSVIYMVQLPIFGVIDTPCWIVKAAPSCSGKKGNYACLLREDQGWYCQNAGSTVYYPNEKDCETRGDHVFCDTAAGINVAEQSKECNINISTTNYPCKVSTGRHPISMVALSPLGALVACYKGVSCSIGSNRVGIIKQLNKGCSYITNQDADTVTIDNTVYQLSKVEGEQHVIKGRPVSSSFDPVKFPEDQFNVALDQVFESIENSQALVDQSNRIL

SEQ ID NO: 65 - protein, 453 aa, Human metapneumovirus
KESYLEESCSTITEGYLSVLRTGWYTNVFTLEVGDVENLTCADGPSLIKTELDLTKSALRELRTVSADQLAREEQIENPRRRRFVLGAIALGVATAAAVTAGVAIAKTIRLESEVTAIKNALKKTNEAVSTLGNGVRVLATAVRELKDFVSKNLTRAINKNKCDIPDLKMAVSFSQFNRRFLNVVRQFSDNAGITPAISLDLMTDAELARAVSNMPTSAGQIKLMLENRAMVRRKGFGFLIGVYGSSVIYMVQLPIFGVIDTPCWIVKAAPSCSGKKGNYACLLREDQGWYCQNAGSTVYYPNEKDCETRGDHVFCDTAAGINVAEQSKECNINISTTNYPCKVSTGRHPISMVALSPLGALVACYKGVSCSIGSNRVGIIKQLNKGCSYITNQDADTVTIDNTVYQLSKVEGEQHVIKGRPVSSSFDPVKFPEDQFNVALDQVFESIENSQA

SEQ ID NO: 66 - protein, 470 aa, Human metapneumovirus
KESYLEESCSTITEGYLSVLRTGWYTNVFTLEVGDVENLTCADGPSLIKTELDLTKSALRELRTVSADQLAREEQIENPRRRRFVLGAIALGVATAAAVTAGVAIAKTIRLESEVTAIKNALKKTNEAVSTLGNGVRVLATAVRELKDFVSKNLTRAINKNKCDIPDLKMAVSFSQFNRRFLNVVRQFSDNAGITPAISLDLMTDAELARAVSNMPTSAGQIKLMLENRAMVRRKGFGFLIGVYGSSVIYMVQLPIFGVIDTPCWIVKAAPSCSGKKGNYACLLREDQGWYCQNAGSTVYYPNEKDCETRGDHVFCDTAAGINVAEQSKECNINISTTNYPCKVSTGRHPISMVALSPLGALVACYKGVSCSIGSNRVGIIKQLNKGCSYITNQDADTVTIDNTVYQLSKVEGEQHVIKGRPVSSSFDPVKFPEDQFNVALDQVFESIENSQALVDQSNRILSSAEKGNT

SEQ ID NO: 67 - protein, 453 aa, Human metapneumovirus
KESYLEESCSTITEGYLSVLRTGWYTNVFTLEVGDVENLTCADGPSLIKTELDLTKSALRELRTVSADQLAREEQIENPRRRRFVLGAIALGVATAAAVTAGVAIAKTIRLESEVTAIKNALKKTNEAVSTLGNGVRVLATAVRELKDFVSKNLTRAINKNKCDIADLKMAVSFSQFNRRFLNVVRQFSDNAGITPAISLDLMTDAELARAVSNMPTSAGQIKLMLENRAMVRRKGFGFLIGVYGSSVIYMVQLPIFGVIDTPCWIVKAAPSCSGKKGNYACLLREDQGWYCQNAGSTVYYPNEKDCETRGDHVFCDTAAGINVAEQSKECNINISTTNYPCKVSTGRHPISMVALSPLGALVACYKGVSCSIGSNRVGIIKQLNKGCSYITNQDADTVTIDNTVYQLSKVEGEQHVIKGRPVSSSFDPVKFPEDQFNVALDQVFESIENSQA

SEQ ID NO: 68 - protein, 453 aa, Human metapneumovirus
KESYLEESCSTITEGYLSVLRTGWYTNVFTLEVGDVENLTCADGPSLIKTELDLTKSALRELRTVSADQLAREEQIENPRRRRFVLGAIALGVATAAAVTAGVAIAKCIRLESEVTAIKNALKKTNEAVSTLGCGVRVLATAVRELKDFVSKNLTRAINKNKCDIPDLKMAVSFSQFNRRFLNVVRQFSDNAGITPAISLDLMTDAELARAVSNMPTSAGQIKLMLENRAMVRRKGFGILIGVYGSSVIYMVQLPIFGVIDTPCWIVKAAPSCSGKKGNYACLLREDQGWYCQNAGSTVYYPNEKDCETRGDHVFCDTAAGINVAEQSKECNINISTTNYPCKVSTGRNPISMVALSPLGALVACYKGVSCSIGSNRVGIIKQLNKGCSYITNQDADTVTIDNTVYQLSKVEGEQHVIKGRPVSSSFDPVKFPEDQFNVALDQVFESIENSQA

SEQ ID NO: 69 - protein, 453 aa, Human metapneumovirus
KESYLEESCSTITEGYLSVLRTGWYTNVFTLEVGDVENLTCTDGPSLIKTELDLTKSALRELKTCSADQLAREEQIEGGGGGGFVLGAIALGVATAAAVTAGIAIAKTIRLESEVNAIKGCLKTTNECVSTLGNGVRVLATAVRELKEFVSKNLTSAINKNKCDIADLKMAVSFSQFNRRFLNVVRQFSDNAGITPAISLDLMTDAELARAVSYMPTSAGQIKLMLENRCMVRRKGFGILIGVYGSSVIYMVQLPIFGVIDTPCWIIKAAPSCSEKDGNYACLLREDQGWYCKNAGSTVYYPNDKDCETRGDHVFCDTAAGINVAEQSRECNINISTTNYPCKVSTGRHPISMVALSPLGALVACYKGVSCSIGSNRVGIIKQLPKGCSYITNQDADTVTIDNTVYQLSKVEGEQHVIKGRPVSSSFDPIKFPEDQFNVALDQVFESIENSQA

SEQ ID NO: 70 - protein, 469 aa, Human metapneumovirus
KESYLEESCSTITEGYLSVLRTGWYTNVFTLEVGDVENLTCTDGPSLIKTELDLTKSALRELKTCSADQLAREEQIEGGGGGGFVLGAIALGVATAAAVTAGIAIAKTIRLESEVNAIKGCLKTTNECVSTLGNGVRVLATAVRELKEFVSKNLTSAINKNKCDIADLKMAVSFSQFNRRFLNVVRQFSDNAGITPAISLDLMTDAELARAVSYMPTSAGQIKLMLENRCMVRRKGFGILIGVYGSSVIYMVQLPIFGVIDTPCWIIKAAPSCSEKDGNYACLLREDQGWYCKNAGSTVYYPNDKDCETRGDHVFCDTAAGINVAEQSRECNINISTTNYPCKVSTGRHPISMVALSPLGALVACYKGVSCSIGSNRVGIIKQLPKGCSYITNQDADTVTIDNTVYQLSKVEGEQHVIKGRPVSSSFDPIKFPEDQFNVALDQVFESIENSQALVDQSNKILNSAESAI

SEQ ID NO: 71 - protein, 453 aa, Human metapneumovirus
KESYLEESCSTITEGYLSVLRTGWYTNVFTLEVGDVENLTCTDCPSLIKTELDLTKSALRELKTVSADQLAREEQIEGGGGGGFVLGAIALGVATAAAVTAGIAIAKTIRLESEVNAIKGCLKTTNECVSTLGNGVRVLATAVRELKEFVSKNLTSAINKNKCDIADLCMAVSFSQFNRRFLNVVRQFSDNAGITPAISLDLMTDAELARAVSYMPTSAGQIKLMLENRAMVRRKGFGILIGVYGSSVIYMVQLPIFGVIDTPCWIIKAAPSCSEKDGNYACLLREDQGWYCKNAGSTVYYPNDKDCETRGDHVFCDTAAGINVAEQSRECNINISTTNYPCKVSTGRHPISMVALSPLGALVACYKGVSCSIGSNRVGIIKQLPKGCSYITNQDADTVTIDNTVYQLSKVEGEQHVIKGRPVSSSFDPICFPEDQFNVALDQVFESIENCQA

SEQ ID NO: 72 - protein, 469 aa, Human metapneumovirus
KESYLEESCSTITEGYLSVLRTGWYTNVFTLEVGDVENLTCTDCPSLIKTELDLTKSALRELKTVSADQLAREEQIEGGGGGGFVLGAIALGVATAAAVTAGIAIAKTIRLESEVNAIKGCLKTTNECVSTLGNGVRVLATAVRELKEFVSKNLTSAINKNKCDIADLCMAVSFSQFNRRFLNVVRQFSDNAGITPAISLDLMTDAELARAVSYMPTSAGQIKLMLENRAMVRRKGFGILIGVYGSSVIYMVQLPIFGVIDTPCWIIKAAPSCSEKDGNYACLLREDQGWYCKNAGSTVYYPNDKDCETRGDHVFCDTAAGINVAEQSRECNINISTTNYPCKVSTGRHPISMVALSPLGALVACYKGVSCSIGSNRVGIIKQLPKGCSYITNQDADTVTIDNTVYQLSKVEGEQHVIKGRPVSSSFDPICFPEDQFNVALDQVFESIENCQALVDQSNKILNSAESAI

SEQ ID NO: 73 - protein, 452 aa, Human metapneumovirus
KESYLEESCSTITEGYLSVLRTGWYTNVFTLEVGDVENLTCSDCPSLIKTELDLTKSALRELKTVSADQLAREEQIEGGGGGGFVLAIALGVATAAAVTAGVAIAKTIRLESEVTAIKNCLKTTNECVSTLGNGVRVLATAVRELKDFVSKNLTSAINKNKCDIDDLCMAVSFSQFNRRFLNVVRQFSDNAGITPAISLDLMTDAELARAVSNMPTSAGQIKLMLENRAMVRRKGFGILIGVYGSSVIYMVQLPIFGVIDTPCWIIKAAPSCSGKKGNYACLLREDQGWYCQNAGSTVYYPNEKDCETRGDHVFCDTAAGINVAEQSKECNINISTTNYPCKVSTGRHPISMVALSPLGALVACYKGVSCSIGSNRVGIIKQLNKGCSYITNQDADTVTIDNTVYQLSKVEGEQHVIKGRPVSSSFDPIKFPEDQFNVALDQVFENIENSQA

SEQ ID NO: 74 - protein, 468 aa, Human metapneumovirus
KESYLEESCSTITEGYLSVLRTGWYTNVFTLEVGDVENLTCSDCPSLIKTELDLTKSALRELKTVSADQLAREEQIEGGGGGGFVLAIALGVATAAAVTAGVAIAKTIRLESEVTAIKNCLKTTNECVSTLGNGVRVLATAVRELKDFVSKNLTSAINKNKCDIDDLCMAVSFSQFNRRFLNVVRQFSDNAGITPAISLDLMTDAELARAVSNMPTSAGQIKLMLENRAMVRRKGFGILIGVYGSSVIYMVQLPIFGVIDTPCWIIKAAPSCSGKKGNYACLLREDQGWYCQNAGSTVYYPNEKDCETRGDHVFCDTAAGINVAEQSKECNINISTTNYPCKVSTGRHPISMVALSPLGALVACYKGVSCSIGSNRVGIIKQLNKGCSYITNQDADTVTIDNTVYQLSKVEGEQHVIKGRPVSSSFDPIKFPEDQFNVALDQVFENIENSQALVDQSNRILSSAESAI

SEQ ID NO: 75 - protein, 453 aa, Human metapneumovirus
KESYLEESCSTITEGYLSVLRTGWYTNVFTLEVGDVENLTCTDGPSLIKTELDLTKSALRELKTVSADQLAREEQIENPRKARFVLGAIALGVCTAAAVTCGIAIAKTIRLESEVNAIKGALKTTNEAVSTLGNGVRVLAFAVRELKEFVSKNLTSALNKNKCDIADLKMAVSFSQFNRRFLNVVRQFSDNAGITPAISLDLMTDAELARAVSYMPTSAGQIKLMLENRAMVRRKGFGILIGVYGSSVIYMVQLPIFGVIDTPCWIIKAAPSCSEKDGNYACLLREDQGWYCKNAGSTVYYPNDKDCETRGDHVFCDTACGINVAEQSRECNINISTTNYPCKVSTGRHPISMVALSPLGALVACYKGVSCSIGSNRVGIIKQLPKGCSYITNQDADTVTIDNTVYCLSKVEGEQHVIKGRPVSSSFDPIKFPEDQFNVALDQVFESIENSQA

SEQ ID NO: 76 - protein, 469 aa, Human metapneumovirus
KESYLEESCSTITEGYLSVLRTGWYTNVFTLEVGDVENLTCTDGPSLIKTELDLTKSALRELKTVSADQLAREEQIENPRKARFVLGAIALGVCTAAAVTCGIAIAKTIRLESEVNAIKGALKTTNEAVSTLGNGVRVLAFAVRELKEFVSKNLTSALNKNKCDIADLKMAVSFSQFNRRFLNVVRQFSDNAGITPAISLDLMTDAELARAVSYMPTSAGQIKLMLENRAMVRRKGFGILIGVYGSSVIYMVQLPIFGVIDTPCWIIKAAPSCSEKDGNYACLLREDQGWYCKNAGSTVYYPNDKDCETRGDHVFCDTACGINVAEQSRECNINISTTNYPCKVSTGRHPISMVALSPLGALVACYKGVSCSIGSNRVGIIKQLPKGCSYITNQDADTVTIDNTVYCLSKVEGEQHVIKGRPVSSSFDPIKFPEDQFNVALDQVFESIENSQALVDQSNKILNSAESAI

SEQ ID NO: 77 - protein, 472 aa, Human metapneumovirus
MSWKVMIIISLLITPQHGLKESYLEESCSTITEGYLSVLRTGWYTNVFTLEVGDVENLTCTDGPSLIKTELDLTKSALRELKTCSADQLAREEQIENPRRRRFVLGAIALGVATAAAVTAGIAIAKTIRLESEVNAIKGCLKTTNECVSTLGNGVRVLATAVRELKEFVSKNLTSAINKNKCDIADLKMAVSFSQFNRRFLNVVRQFSDNAGITPAISLDLMTDAELARAVSYMPTSAGQIKLMLENRCMVRRKGFGILIGVYGSSVIYMVQLPIFGVIDTPCWIIKAAPSCSEKDGNYACLLREDQGWYCKNAGSTVYYPNDKDCETRGDHVFCDTAAGINVAEQSRECNINISTTNYPCKVSTGRHPISMVALSPLGALVACYKGVSCSIGSNRVGIIKQLPKGCSYITNQDADTVTIDNTVYQLSKVEGEQHVIKGRPVSSSFDPIKFPEDQFNVALDQVFESIENSQA

SEQ ID NO: 78 - protein, 453 aa, Human metapneumovirus
KESYLEESCSTITEGYLSVLRTGWYTNVFTLEVGDVENLTCTDCPSLIKTELDLTKSALRELKTVSADQLAREEQIENPRRRRFVLGAIALGVATAAAVTAGIAIAKTIRLESEVNAIKGCLKTTNECVSTLGNGVRVLATAVRELKEFVSKNLTSAINKNKCDIADLCMAVSFSQFNRRFLNVVRQFSDNAGITPAISLDLMTDAELARAVSYMPTSAGQIKLMLENRAMVRRKGFGILIGVYGSSVIYMVQLPIFGVIDTPCWIIKAAPSCSEKDGNYACLLREDQGWYCKNAGSTVYYPNDKDCETRGDHVFCDTAAGINVAEQSRECNINISTTNYPCKVSTGRHPISMVALSPLGALVACYKGVSCSIGSNRVGIIKQLPKGCSYITNQDADTVTIDNTVYQLSKVEGEQHVIKGRPVSSSFDPICFPEDQFNVALDQVFESIENCQA

SEQ ID NO: 79 - protein, 452 aa, Human metapneumovirus
KESYLEESCSTITEGYLSVLRTGWYTNVFTLEVGDVENLTCSDCPSLIKTELDLTKSALRELKTVSADQLAREEQIENPRRRRFVLAIALGVATAAAVTAGVAIAKTIRLESEVTAIKNCLKTTNECVSTLGNGVRVLATAVRELKDFVSKNLTSAINKNKCDIDDLCMAVSFSQFNRRFLNVVRQFSDNAGITPAISLDLMTDAELARAVSNMPTSAGQIKLMLENRAMVRRKGFGILIGVYGSSVIYMVQLPIFGVIDTPCWIIKAAPSCSGKKGNYACLLREDQGWYCQNAGSTVYYPNEKDCETRGDHVFCDTAAGINVAEQSKECNINISTTNYPCKVSTGRHPISMVALSPLGALVACYKGVSCSIGSNRVGIIKQLNKGCSYITNQDADTVTIDNTVYQLSKVEGEQHVIKGRPVSSSFDPIKFPEDQFNVALDQVFENIENSQA

SEQ ID NO: 80 - protein, 453 aa, Human metapneumovirus
KESYLEESCSTITEGYLSVLRTGWYTNVFTLEVGDVENLTCTDGPSLIKTELDLTKSALRELKTVSADQLAREEQIENPRRRRFVLGAIALGVCTAAAVTCGIAIAKTIRLESEVNAIKGALKTTNEAVSTLGNGVRVLAFAVRELKEFVSKNLTSALNKNKCDIADLKMAVSFSQFNRRFLNVVRQFSDNAGITPAISLDLMTDAELARAVSYMPTSAGQIKLMLENRAMVRRKGFGILIGVYGSSVIYMVQLPIFGVIDTPCWIIKAAPSCSEKDGNYACLLREDQGWYCKNAGSTVYYPNDKDCETRGDHVFCDTACGINVAEQSRECNINISTTNYPCKVSTGRHPISMVALSPLGALVACYKGVSCSIGSNRVGIIKQLPKGCSYITNQDADTVTIDNTVYCLSKVEGEQHVIKGRPVSSSFDPIKFPEDQFNVALDQVFESIENSQA

SEQ ID NO: 81 - protein, 453 aa, Human metapneumovirus
KESYLEESCSTITEGYLSVLRTGWYTNVFTLEVGDVENLTCADGPSLIKTELDLTKSALRELRTVSADQLAREEQIENPRRRRFVLGAIALGVCTAAAVTAGVAIAKTIRLESEVTAIKNALKKTNEAVSTLGNGVRVLATAVRELKDFVSKNLTRAINKNKCDIPDLKMAVSFSQFNRRFLNVVRQFSDNAGITPAISLDLMTDAELARAVSNMPTSAGQIKLMLENRAMVRRKGFGFLIGVYGSSVIYMVQLPIFGVIDTPCWIVKAAPSCSGKKGNYACLLREDQGWYCQNAGSTVYYPNEKDCETRGDHVFCDTACGINVAEQSKECNINISTTNYPCKVSTGRHPISMVALSPLGALVACYKGVSCSIGSNRVGIIKQLNKGCSYITNQDADTVTIDNTVYQLSKVEGEQHVIKGRPVSSSFDPVKFPEDQFNVALDQVFESIENSQA

SEQ ID NO: 82 - protein, 453 aa, Human metapneumovirus
KESYLEESCSTITEGYLSVLRTGWYTNVFTLEVGDVENLTCADGPSLIKTELDLTKSALRELRTVSADQLAREEQIENPRRRRFVLGAIALGVATAAAVTAGVAIAKTIRLESEVTAIKNALKKTNEAVSTLGNGVRVLAFAVRELKDFVSKNLTRALNKNKCDIPDLKMAVSFSQFNRRFLNVVRQFSDNAGITPAISLDLMTDAELARAVSNMPTSAGQIKLMLENRAMVRRKGFGFLIGVYGSSVIYMVQLPIFGVIDTPCWIVKAAPSCSGKKGNYACLLREDQGWYCQNAGSTVYYPNEKDCETRGDHVFCDTAAGINVAEQSKECNINISTTNYPCKVSTGRHPISMVALSPLGALVACYKGVSCSIGSNRVGIIKQLNKGCSYITNQDADTVTIDNTVYQLSKVEGEQHVIKGRPVSSSFDPVKFPEDQFNVALDQVFESIENSQA

SEQ ID NO: 83 - protein, 453 aa, Human metapneumovirus
KESYLEESCSTITEGYLSVLRTGWYTNVFTLEVGDVENLTCADGPSLIKTELDLTKSALRELRTVSADQLAREEQIENPRRRRFVLGAIALGVCTAAAVTAGVAIAKTIRLESEVTAIKNALKKTNEAVSTLGNGVRVLAFAVRELKDFVSKNLTRALNKNKCDIPDLKMAVSFSQFNRRFLNVVRQFSDNAGITPAISLDLMTDAELARAVSNMPTSAGQIKLMLENRAMVRRKGFGFLIGVYGSSVIYMVQLPIFGVIDTPCWIVKAAPSCSGKKGNYACLLREDQGWYCQNAGSTVYYPNEKDCETRGDHVFCDTACGINVAEQSKECNINISTTNYPCKVSTGRHPISMVALSPLGALVACYKGVSCSIGSNRVGIIKQLNKGCSYITNQDADTVTIDNTVYQLSKVEGEQHVIKGRPVSSSFDPVKFPEDQFNVALDQVFESIENSQA

SEQ ID NO: 84 - protein, 453 aa, Human metapneumovirus
KESYLEESCSTITEGYLSVLRTGWYTNVFTLEVGDVENLTCTDCPSLIKTELDLTKSALRELKTVSADQLAREEQIEGGGGGGFVLGAIALGVATAAAVTAGIAIAKTIRLESEVNAIKGALKTTNEAVSTLGNGVRVLATAVRELKEFVSKNLTSAINKNKCDIADLCMAVSFSQFNRRFLNVVRQFSDNAGITPAISLDLMTDAELARAVSYMPTSAGQIKLMLENRAMVRRKGFGILIGVYGSSVIYMVQLPIFGVIDTPCWIIKAAPSCSEKDGNYACLLREDQGWYCKNAGSTVYYPNDKDCETRGDHVFCDTAAGINVAEQSRECNINISTTNYPCKVSTGRHPISMVALSPLGALVACYKGVSCSIGSNRVGIIKQLPKGCSYITNQDADTVTIDNTVYQLSKVEGEQHVIKGRPVSSSFDPIKFPEDQFNVALDQVFESIENSQA

SEQ ID NO: 85 - protein, 453 aa, Human metapneumovirus
KESYLEESCSTITEGYLSVLRTGWYTNVFTLEVGDVENLTCTDCPSLIKTELDLTKSALRELKTVSADQLAREEQIEGGGGGGFVLGAIALGVATAAAVTAGIAIAKTIRLESEVNAIKGALKTTNEAVSTLGNGVRVLATAVRELKEFVSKNLTSAINKNKCDIADLCMAVSFSQFNRRFLNVVRQFSDNAGITPAISLDLMTDAELARAVSYMPTSAGQIKLMLENRAMVRRKGFGILIGVYGSSVIYMVQLPIFGVIDTPCWIIKAAPSCSEKDGNYACLLREDQGWYCKNAGSTVYYPNDKDCETRGDHVFCDTAAGINVAEQSRECNINISTTNYPCKVSTGRHPISMVALSPLGALVACYKGVSCSIGSNRVGIIKQLPKGCSYITNQDADTVTIDNTVYQLSKVEGEQHVIKGRPVSSSFDPIAFPEDQFNVALDQVFESIENAQA

SEQ ID NO: 86 - protein, 453 aa, Human metapneumovirus
KESYLEESCSTITEGYLSVLRTGWYTNVFTLEVGDVENLTCSDCPSLIKTELDLTKSALRELKTVSADQLAREEQIEGGGGGGFVLGAIALGVATAAAVTAGVAIAKTIRLESEVTAIKNCLKTTNECVSTLGNGVRVLATAVRELKDFVSKNLTSAINKNKCDIDDLCMAVSFSQFNRRFLNVVRQFSDNAGITPAISLDLMTDAELARAVSNMPTSAGQIKLMLENRAMVRRKGFGILIGVYGSSVIYMVQLPIFGVIDTPCWIIKAAPSCSEKKGNYACLLREDQGWYCQNAGSTVYYPNEKDCETRGDHVFCDTAAGINVAEQSKECNINISTTNYPCKVSTGRHPISMVALSPLGALVACYKGVSCSIGSNRVGIIKQLNKGCSYITNQDADTVTIDNTVYQLSKVEGEQHVIKGRPVSSSFDPIKFPEDQFNVALDQVFENIENSQA

SEQ ID NO: 87 - protein, 453 aa, Human metapneumovirus
KESYLEESCSTITEGYLSVLRTGWYTNVFTLEVGDVENLTCADCPSLIKTELDLTKSALRELRTVSADQLAREEQIEGGGGGGFVLGAIALGVATAAAVTAGVAIAKTIRLESEVTAIKNCLKKTNECVSTLGNGVRVLATAVRELKDFVSKNLTRAINKNKCDIADLCMAVSFSQFNRRFLNVVRQFSDNAGITPAISLDLMTDAELARAVSNMPTSAGQIKLMLENRAMVRRKGFGFLIGVYGSSVIYMVQLPIFGVIDTPCWIVKAAPSCSEKKGNYACLLREDQGWYCQNAGSTVYYPNEKDCETRGDHVFCDTAAGINVAEQSKECNINISTTNYPCKVSTGRHPISMVALSPLGALVACYKGVSCSIGSNRVGIIKQLNKGCSYITNQDADTVTIDNTVYQLSKVEGEQHVIKGRPVSSSFDPVCFPEDQFNVALDQVFESIENCQA

SEQ ID NO: 88 - protein, 453 aa, Human metapneumovirus
KESYLEESCSTITEGYLSVLRTGWYTNVFTLEVGDVENLTCADCPSLIKTELDLTKSALRELRTVSADQLAREEQIEGGGGGGFVLGAIALGVATAAAVTAGVAIAKTIRLESEVTAIKNALKKTNEAVSTLGNGVRVLATAVRELKDFVSKNLTRAINKNKCDIADLCMAVSFSQFNRRFLNVVRQFSDNAGITPAISLDLMTDAELARAVSNMPTSAGQIKLMLENRAMVRRKGFGFLIGVYGSSVIYMVQLPIFGVIDTPCWIVKAAPSCSEKKGNYACLLREDQGWYCQNAGSTVYYPNEKDCETRGDHVFCDTAAGINVAEQSKECNINISTTNYPCKVSTGRHPISMVALSPLGALVACYKGVSCSIGSNRVGIIKQLNKGCSYITNQDADTVTIDNTVYQLSKVEGEQHVIKGRPVSSSFDPVKFPEDQFNVALDQVFESIENSQA

SEQ ID NO: 89 - protein, 453 aa, Human metapneumovirus
KESYLEESCSTITEGYLSVLRTGWYTNVFTLEVGDVENLTCADGPSLIKTELDLTKSALRELRTVSADQLAREEQIENPRRRRFVLGAIALGVATAAAVTAGVAIAKCIRLESEVTAIKNALKKTNEAVSTLGCGVRVLATAVRELKDFVSKNLTRAINKNKCDIPDLKMAVSFSQFNRRFLNVVRQFSDNAGITPAISKDLMTDAELARAISNMPTSAGQIKLMLENRAMVRRKGFGILIGVYGSSVIYMVQLPIFGVIDTPCWIVKAAPSCSEKKGNYACLLREDQGWYCQNAGSTVYYPNEKDCETRGDHVFCDTAAGINVAEQSKECNINISTTNYPCKVSCGRNPISMVALSPLGALVACYKGVSCSIGSNRVGIIKQLNKGCSYITNQDADTVTIDNTVYQLSKVEGEQHVIKGRPVSSSFDPVKFPEDQFNVALDQCFESIENSQA

SEQ ID NO: 90 - protein, 471 aa, Human metapneumovirus
KESYLEESCSTITEGYLSVLRTGWYTNVFTLEVGDVENLTCADGPSLIKTELDLTKSALRELRTVSADQLAREEQIENPRRRRFVLGAIALGVATAAAVTAGVAIAKCIRLESEVTAIKNALKKTNEAVSTLGCGVRVLATAVRELKDFVSKNLTRAINKNKCDIPDLKMAVSFSQFNRRFLNVVRQFSDNAGITPAISKDLMTDAELARAISNMPTSAGQIKLMLENRAMVRRKGFGILIGVYGSSVIYMVQLPIFGVIDTPCWIVKAAPSCSEKKGNYACLLREDQGWYCQNAGSTVYYPNEKDCETRGDHVFCDTAAGINVAEQSKECNINISTTNYPCKVSCGRNPISMVALSPLGALVACYKGVSCSIGSNRVGIIKQLNKGCSYITNQDADTVTIDNTVYQLSKVEGEQHVIKGRPVSSSFDPVKFPEDQFNVALDQCFESIENSQALVDQSNRILSSAEKGNTG

SEQ ID NO: 91 - protein, 453 aa, Human metapneumovirus; identical to SEQ ID NO: 71

SEQ ID NO: 92 - protein, 453 aa, Human metapneumovirus; identical to SEQ ID NO: 89

SEQ ID NO: 93 - protein, 471 aa, Human metapneumovirus; identical to SEQ ID NO: 90

SEQ ID NO: 94 - protein, 453 aa, Human metapneumovirus; identical to SEQ ID NO: 69

SEQ ID NO: 95 - protein, 453 aa, Human metapneumovirus
KESYLEESCSTITEGYLSVLRTGWYTNVFTLEVGDVENLTCADGPSLIKTELDLTKSALRELRTVSADQLAREEQIEGGGGGGFVLGAIALGVATAAAVTAGVAIAKCIRLESEVTAIKNALKKTNEAVSTLGCGVRVLATAVRELKDFVSKNLTRAINKNKCDIPDLKMAVSFSQFNRRFLNVVRQFSDNAGITPAISKDLMTDAELARAISNMPTSAGQIKLMLENRAMVRRKGFGILIGVYGSSVIYMVQLPIFGVIDTPCWIVKAAPSCSEKKGNYACLLREDQGWYCQNAGSTVYYPNEKDCETRGDHVFCDTAAGINVAEQSKECNINISTTNYPCKVSCGRNPISMVALSPLGALVACYKGVSCSIGSNRVGIIKQLNKGCSYITNQDADTVTIDNTVYQLSKVEGEQHVIKGRPVSSSFDPVKFPEDQFNVALDQCFESIENSQA

SEQ ID NO: 96 - protein, 471 aa, Human metapneumovirus
KESYLEESCSTITEGYLSVLRTGWYTNVFTLEVGDVENLTCADGPSLIKTELDLTKSALRELRTVSADQLAREEQIEGGGGGGFVLGAIALGVATAAAVTAGVAIAKCIRLESEVTAIKNALKKTNEAVSTLGCGVRVLATAVRELKDFVSKNLTRAINKNKCDIPDLKMAVSFSQFNRRFLNVVRQFSDNAGITPAISKDLMTDAELARAISNMPTSAGQIKLMLENRAMVRRKGFGILIGVYGSSVIYMVQLPIFGVIDTPCWIVKAAPSCSEKKGNYACLLREDQGWYCQNAGSTVYYPNEKDCETRGDHVFCDTAAGINVAEQSKECNINISTTNYPCKVSCGRNPISMVALSPLGALVACYKGVSCSIGSNRVGIIKQLNKGCSYITNQDADTVTIDNTVYQLSKVEGEQHVIKGRPVSSSFDPVKFPEDQFNVALDQCFESIENSQALVDQSNRILSSAEKGNTG

SEQ ID NO: 97 - protein, 869 aa, Human immunodeficiency virus 1
MRVKGIKKNYQHWWRGGIMLLGMLMICSSAEKLWVTVYYGVPVWKEATTTLFCASDAKAQNPEMHNIWATHACVPTDPNPQEVILKNLTEEFNMWKNNMVEQMHEDIISLWDQSLKPCVKLTPLCVTLNCTNAESLNCTATNGTNNCSASTKPMEEMKNCSFNITTSVQDKKQQEYALFYKLDIIPIDNNENDLNNTNYTSYRLISCNTSVITQACPKITFEPIPIHYCAPAGFAILKCKDKRFNGTGPCKNVSTVQCTHGIRPVVSTQLLLNGSLAEEGVVLRSENFTDNAKNIIVQLKDPVNITCTRPNNNTRKSITIGPGRAFYATGQVIGDIRKAHCDLNGTEWDNALKQIVEELRKQYGNNITIFNSSSGGDPEIVMHSFNCGGEFFYCNTAQLFNSTWLFNSTWNSTERLGNDTERTNDTITLPCKIKQVINMWQTVGKAMYAPPIRGLIRCSSNITGLILTRDGSGNTTGNETFRPGGGNMKDNWRSELYKYKVVKIEPLGVAPTRAKRRVVQREKRAAGLGALFLGFLGMAGSTMGAASLTLTVQARQLLSGIVQQQNNLLRAIEAQQHLLQLTVWGIKQLQARVLAVERYLRDQQLLGIWGCSGKLICTTTVPWNASWSNKSLDNIWENMTWMQWEKEIDNYTDVIYKLLEESQNQQEKNEQELLELDKWASLWNWFDITRWLWYIKIFIMIVGGLVGLRIVFAVLSIVNRVRQGYSPLSFQTLFPAPRGPDRPEGTEEGGGERGRDSSDRSAHGFLALIWGDLWSLCLFSYRRLRDLLLIAARIVELLGRRGWEVLKYWWSLLQYWSQELKKSAVSLLNATAIAVAEGTDRIIEIVQRAGRAIIHIPRRIRQGAERALL

SEQ ID NO: 98 - protein, 492 aa, Human immunodeficiency virus 1
LWVTVYYGVPVWKEATTTLFCASDAKAQNPEMHNIWATHACVPTDPNPQEVILKNLTEEFNMWKNNMVEQMHEDIISLWDQSLKPCVKLTPLCVTLNCTNAESLNCTATNGTNNCSASTKPMEEMKNCSFNITTSVQDKKQQEYALFYKLDIIPIDNNENDLNNTNYTSYRLISCNTSVITQACPKITFEPIPIHYCAPAGFAILKCKDKRFNGTGPCKNVSTVQCTHGIRPVVSTQLLLNGSLAEEGVVLRSENFTDNAKNIIVQLKDPVNITCTRPNNNTRKSITIGPGRAFYATGQVIGDIRKAHCDLNGTEWDNALKQIVEELRKQYGNNITIFNSSSGGDPEIVMHSFNCGGEFFYCNTAQLFNSTWLFNSTWNSTERLGNDTERTNDTITLPCKIKQVINMWQTVGKAMYAPPIRGLIRCSSNITGLILTRDGSGNTTGNETFRPGGGNMKDNWRSELYKYKVVKIEPLGVAPTRAKRRVVQREKR

SEQ ID NO: 99 - protein, 191 aa, Human immunodeficiency virus 1
MGAASLTLTVQARQLLSGIVQQQNNLLRAIEAQQHLLQLTVWGIKQLQARVLAVERYLRDQQLLGIWGCSGKLICTTTVPWNASWSNKSLDNIWENMTWMQWEKEIDNYTDVIYKLLEESQNQQEKNEQELLELDKWASLWNWFDITRWLWYIKIFIMIVGGLVGLRIVFAVLSIVNRVRQGYSPLSFQTL

SEQ ID NO: 100 - protein, 22 aa, Human immunodeficiency virus 1
ELDKWASLWNWFDITRWLWYIK

SEQ ID NO: 101 - protein, 574 aa, Respiratory syncytial virus type A
MELPILKTNAITTILAAVTLCFASSQNITEEFYQSTCSAVSKGYLSALRTGWYTSVITIELSNIKENKCNGTDAKVKLIKQELDKYKNAVTELQLLMQSTPAANNRARRELPRFMNYTLNNTKNNNVTLSKKRKRRFLGFLLGVGSAIASGIAVSKVLHLEGEVNKIKNALLSTNKAVVSLSNGVSVLTSKVLDLKNYIDKQLLPIVNKQSCSISNIETVIEFQQKNNRLLEITREFSVNAGVTTPVSTYMLTNSELLSLINDMPITNDQKKLMSNNVQIVRQQSYSIMSIIKEEVLAYVVQLPLYGVIDTPCWKLHTSPLCTTNTKEGSNICLTRTDRGWYCDNAGSVSFFPQAETCKVQSNRVFCDTMNSLTLPSEVNLCNIDIFNPKYDCKIMTSKTDVSSSVITSLGAIVSCYGKTKCTASNKNRGIIKTFSNGCDYVSNKGVDTVSVGNTLYYVNKQEGKSLYVKGEPIINFYDPLVFPSDEFDASISQVNEKINQSLAFIRKSDELLHNVNVGKSTTNIMITTIIIVIIVILLLLIAVGLFLYCKARSTPVTLSKDQLSGINNIAFSN

SEQ ID NO: 102 - protein, 566 aa, Influenza A virus
MKAILVVLLYTFATANADTLCIGYHANNSTDTVDTVLEKNVTVTHSVNLLEDKHNGKLCKLRGVAPLHLGKCNIAGWILGNPECESLSTASSWSYIVETPSSDNGTCYPGDFIDYEELREQLSSVSSFERFEIFPKTSSWPNHDSNKGVTAACPHAGAKSFYKNLIWLVKKGNSYPKLSKSYINDKGKEVLVLWGIHHPSTSADQQSLYQNADAYVFVGSSRYSKKFKPEIAIRPKVRDQEGRMNYYWTLVEPGDKITFEATGNLVVPRYAFAMERNAGSGIIISDTPVHDCNTTCQTPKGAINTSLPFQNIHPITIGKCPKYVKSTKLRLATGLRNIPSIQSRGLFGAIAGFIEGGWTGMVDGWYGYHHQNEQGSGYAADLKSTQNAIDEITNKVNSVIEKMNTQFTAVGKEFNHLEKRIENLNKKVDDGFLDIWTYNAELLVLLENERTLDYHDSNVKNLYEKVRSQLKNNAKEIGNGCFEFYHKCDNTCMESVKNGTYDYPKYSEEAKLNREEIDGVKLESTRIYQILAIYSTVASSLVLVVSLGAISFWMCSNGSLQCRICI

SEQ ID NO: 103 - protein, 584 aa, Influenza B virus
MKAIIVLLMVVTSNADRICTGITSSNSPHVVKTATQGEVNVTGVIPLTTTPTKSYFANLKGTKTRGKLCPDCLNCTDLDVALGRPMCVGTTPSAKASILHEVRPVTSGCFPIMHDRTKIRQLANLLRGYENIRLSTQNVIDAEKAPGGPYRLGTSGSCPNATSKSGFFATMAWAVPKDNNKNATNPLTVEVPYICAEGEDQITVWGFHSDNKTQMKNLYGDSNPQKFTSSANGVTTHYVSQIGGFPDQTEDGGLPQSGRIVVDYMMQKPGKTGTIVYQRGVLLPQKVWCASGRSKVIKGSLPLIGEADCLHEKYGGLNKSKPYYTGEHAKAIGNCPIWVKTPLKLANGTKYRPPAKLLKERGFFGAIAGFLEGGWEGMIAGWHGYTSHGAHGVAVAADLKSTQEAINKITKNLNSLSELEVKNLQRLSGAMDELHNEILELDEKVDDLRADTISSQIELAVLLSNEGIINSEDEHLLALERKLKKMLGPSAVDIGNGCFETKHKCNQTCLDRIAAGTFNAGEFSLPTFDSLNITAASLNDDGLDNHTILLYYSTAASSLAVTLMLAIFIVYMVSRDNVSCSICL

SEQ ID NO: 104 - protein, 907 aa, Epstein-Barr virus
MEAALLVCQYTIQSLIHLTGEDPGFFNVEIPEFPFYPTCNVCTADVNVTINFDVGGKKHQLDLDFGQLTPHTKAVYQPRGAFGGSENATNLFLLELLGAGELALTMRSKKLPINVTTGEEQQVSLESVDVYFQDVFGTMWCHHAEMQNPVYLIPETVPYIKWDNCNSTNITAVVRAQGLDVTLPLSLPTSAQDSNFSVKTEMLGNEIDIECIMEDGEISQVLPGDNKFNITCSGYESHVPSGGILTSTSPVATPIPGTGYAYSLRLTPRPVSRFLGNNSILYVFYSGNGPKASGGDYCIQSNIVFSDEIPASQDMPTNTTDITYVGDNATYSVPMVTSEDANSPNVTVTAFWAWPNNTETDFKCKWTLTSGTPSGCENISGAFASNRTFDITVSGLGTAPKTLIITRTATNATTTTHKVIFSKAPESTTTSPTLNTTGFADPNTTTGLPSSTHVPTNLTAPASTGPTVSTADVTSPTPAGTTSGASPVTPSPSPWDNGTESKAPDMTSSTSPVTTPTPNATSPTPAVTTPTPNATSPTPAVTTPTPNATSPTLGKTSPTSAVTTPTPNATSPTLGKTSPTSAVTTPTPNATSPTLGKTSPTSAVTTPTPNATGPTVGETSPQANATNHTLGGTSPTPVVTSQPKNATSAVTTGQHNITSSSTSSMSLRPSSNPETLSPSTSDNSTSHMPLLTSAHPTGGENITQVTPASISTHHVSTSSPAPRPGTTSQASGPGNSSTSTKPGEVNVTKGTPPQNATSPQAPSGQKTAVPTVTSTGGKANSTTGGKHTTGHGARTSTEPTTDYGGDSTTPRPRYNATTYLPPSTSSKLRPRWTFTSPPVTTAQATVPVPPTSQPRFSNLSMLVLQWASLAVLTLLLLLVMADCAFRRNLSTSHTYTTPPYDDAETYV

SEQ ID NO: 105 - protein, 906 aa, Human cytomegalovirus
MESRIWCLVVCVNLCIVCLGAAVSSSSTSHATSSTHNGSHTSRTTSAQTRSVYSQHVTSSEAVSHRANETIYNTTLKYGDVVGVNTTKYPYRVCSMAQGTDLIRFERNIICTSMKPINEDLDEGIMVVYKRNIVAHTFKVRVYQKVLTFRRSYAYIYTTYLLGSNTEYVAPPMWEIHHINKFAQCYSSYSRVIGGTVFVAYHRDSYENKTMQLIPDDYSNTHSTRYVTVKDQWHSRGSTWLYRETCNLNCMLTITTARSKYPYHFFATSTGDVVYISPFYNGTNRNASYFGENADKFFIFPNYTIVSDFGRPNAAPETHRLVAFLERADSVISWDIQDEKNVTCQLTFWEASERTIRSEAEDSYHFSSAKMTATFLSKKQEVNMSDSALDCVRDEAINKLQQIFNTSYNQTYEKYGNVSVFETSGGLVVFWQGIKQKSLVELERLANRSSLNITHRTRRSTSDNNTTHLSSMESVHNLVYAQLQFTYDTLRGYINRALAQIAEAWCVDQRRTLEVFKELSKINPSAILSAIYNKPIAARFMGDVLGLASCVTINQTSVKVLRDMNVKESPGRCYSRPVVIFNFANSSYVQYGQLGEDNEILLGNHRTEECQLPSLKIFIAGNSAYEYVDYLFKRMIDLSSISTVDSMIALDIDPLENTDFRVLELYSQKELRSSNVFDLEEIMREFNSYKQRVKYVEDKVVDPLPPYLKGLDDLMSGLGAAGKAVGVAIGAVGGAVASVVEGVATFLKNPFGAFTIILVAIAVVIITYLIYTRQRRLCTQPLQNLFPYLVSADGTTVTSGSTKDTSLQAPPSYEESVYNSGRKGPGPPSSDASTAAPPYTNEQAYQMLLALARLDAEQRAQQNGTDSLDGQTGTQDKGQKPNLLDRLRHRKNGYRHLKDSDEEENV

SEQ ID NO: 106 - protein, 171 aa, Human cytomegalovirus
MSPKDLTPFLTTLWLLLGHSRVPRVRAEECCEFINVNHPPERCYDFKMCNRFTVALRCPDGEVCYSPEKTAEIRGIVTTMTHSLTRQVVHNKLTSCNYNPLYLEADGRIRCGKVNDKAQYLLGAAGSVPYRWINLEYDKITRIVGLDQYLESVKKHKRLDVCRAKMGYMLQ

SEQ ID NO: 107 - protein, 214 aa, Human cytomegalovirus
MLRLLLRHHFHCLLLCAVWATPCLASPWSTLTANQNPSPPWSKLTYSKPHDAATFYCPFLYPSPPRSPLQFSGFQRVSTGPECRNETLYLLYNREGQTLVERSSTWVKKVIWYLSGRNQTILQRMPRTASKPSDGNVQISVEDAKIFGAHMVPKQTKLLRFVVNDGTRYQMCVMKLESWAHVFRDYSVSFQVRLTFTEANNQTYTFCTHPNLIV

SEQ ID NO: 108 - protein, 129 aa, Human cytomegalovirus
MRLCRVWLSVCLCAVVLGQCQRETAEKNDYYRVPHYWDACSRALPDQTRYKYVEQLVDLTLNYHYDASHGLDNFDVLKRINVTEVSLLISDFRRQNRRGGTNKRTTFNAAGSLAPHARSLEFSVRLFAN

SEQ ID NO: 109 - protein, 743 aa, Human cytomegalovirus
MRPGLPPYLTVFTVYLLSHLPSQRYGADAASEALDPHAFHLLLNTYGRPIRFLRENTTQCTYNSSLRNSTVVRENAISFNFFQSYNQYYVFHMPRCLFAGPLAEQFLNQVDLTETLERYQQRLNTYALVSKDLASYRSFSQQLKAQDSLGQQPTTVPPPIDLSIPHVWMPPQTTPHDWKGSHTTSGLHRPHFNQTCILFDGHDLLFSTVTPCLHQGFYLMDELRYVKITLTEDFFVVTVSIDDDTPMLLIFGHLPRVLFKAPYQRDNFILRQTEKHELLVLVKKAQLNRHSYLKDSDFLDAALDFNYLDLSALLRNSFHRYAVDVLKSGRCQMLDRRTVEMAFAYALALFAAARQEEAGTEISIPRALDRQAALLQIQEFMITCLSQTPPRTTLLLYPTAVDLAKRALWTPDQITDITSLVRLVYILSKQNQQHLIPQWALRQIADFALQLHKTHLASFLSAFARQELYLMGSLVHSMLVHTTERREIFIVETGLCSLAELSHFTQLLAHPHHEYLSDLYTPCSSSGRRDHSLERLTRLFPDATVPATVPAALSILSTMQPSTLETFPDLFCLPLGESFSALTVSEHVSYVVTNQYLIKGISYPVSTTVVGQSLIITQTDSQTKCELTRNMHTTHSITAALNISLENCAFCQSALLEYDDTQGVINIMYMHDSDDVLFALDPYNEVVVSSPRTHYLMLLKNGTVLEVTDVVVDATDSRLLMMSVYALSAIIGIYLLYRMLKTC

SEQ ID NO: 110 - protein, 278 aa, Human cytomegalovirus
MCRRPDCGFSFSPGPVVLLWCCLLLPIVSSVAVSVAPTAAEKVPAECPELTRRCLLGEVFQGDKYESWLRPLVNVTRRDGPLSQLIRYRPVTPEAANSVLLDDAFLDTLALLYNNPDQLRALLTLLSSDTAPRWMTVMRGYSECGDGSPAVYTCVDDLCRGYDLTRLSYGRSIFTEHVLGFELVPPSLFNVVVAIRNEATRTNRAVRLPVSTAAAPEGITLFYGLYNAVKEFCLRHQLDPPLLRHLDKYYAGLPPELKQTRVNLPAHSRYGPQAVDAR

SEQ ID NO: 111 - protein, 272 aa, Borreliella burgdorferi
MKKYLLGIGLILALIACKQNVSSLDEKNSVSVDVPGGMKVLVSKEKNKDGKYDLMATVDNVDLKGTSDKNNGSGILEGVKADKSKVKLTVADDLSKTTLEVLKEDGTVVSRKVTSKDKSTTEAKFNEKGELSEKTMTRANGTTLEYSQMTNEDNAAKAVETLKNGIKFEGNLASGKTAVEIKEGTVTLKREIDKNGKVTVSLNDTASGSKKTASWQESTSTLTISANSKKTKDLVFLTNGTITVQNYDSAGTKLEGSAAEIKKLDELKNALR

SEQ ID NO: 112 - protein, 269 aa, Bordetella pertussis
MRCTRAIRQTARTGWLTWLAILAVTAPVTSPAWADDPPATVYRYDSRPPEDVFQNGFTAWGNNDNVLDHLTGRSCQVGSSNSAFVSTSSSRRYTEVYLEHRMQEAVEAERAGRGTGHFIGYIYEVRADNNFYGAASSYFEYVDTYGDNAGRILAGALATYQSEYLAHRRIPPENIRRVTRVYHNGITGETTTTEYSNARYVSQQTRANPNPYTSRRSVASIVGTLVRMAPVIGACMARQAESSEAMAAWSERAGEAMVLVYYESIAYSF

SEQ ID NO: 113 - protein, 495 aa, Dengue virus
MRCVGIGNRDFVEGLSGATWVDVVLEHGSCVTTMAKDKPTLDIELLKTEVTNPAVLRKLCIEAKISNTTTDSRCPTQGEATLVEEQDTNFVCRRTFVDRGWGNGCGLFGKGSLITCAKFKCVTKLEGKIVQYENLKYSVIVTVHTGDQHQVGNETTEHGTTATITPQAPTSEIQLTDYGALTLDCSPRTGLDFNEMVLLTMEKKSWLVHKQWFLDLPLPWTSGASTSQETWNRQDLLVTFKTAHAKKQEVVVLGSQEGAMHTALTGATEIQTSGTTTIFAGHLKCRLKMDKLTLKGMSYVMCTGSFKLEKEVAETQHGTVLVQVKYEGTDAPCKIPFSSQDEKGVTQNGRLITANPIVTDKEKPVNIEAEPPFGESYIVVGAGEKALKLSWFKKGSSIGKMFEATARGARRMAILGDTAWDFGSIGGVFTSVGKLIHQIFGTAYGVLFSGVSWTMKIGIGILLTWLGLNSRSTSLSMTCIAVGMVTLYLGVMVQA

SEQ ID NO: 114 - protein, 1255 aa, Human SARS coronavirus
MFIFLLFLTLTSGSDLDRCTTFDDVQAPNYTQHTSSMRGVYYPDEIFRSDTLYLTQDLFLPFYSNVTGFHTINHTFGNPVIPFKDGIYFAATEKSNVVRGWVFGSTMNNKSQSVIIINNSTNVVIRACNFELCDNPFFAVSKPMGTQTHTMIFDNAFNCTFEYISDAFSLDVSEKSGNFKHLREFVFKNKDGFLYVYKGYQPIDVVRDLPSGFNTLKPIFKLPLGINITNFRAILTAFSPAQDIWGTSAAAYFVGYLKPTTFMLKYDENGTITDAVDCSQNPLAELKCSVKSFEIDKGIYQTSNFRVVPSGDVVRFPNITNLCPFGEVFNATKFPSVYAWERKKISNCVADYSVLYNSTFFSTFKCYGVSATKLNDLCFSNVYADSFVVKGDDVRQIAPGQTGVIADYNYKLPDDFMGCVLAWNTRNIDATSTGNYNYKYRYLRHGKLRPFERDISNVPFSPDGKPCTPPALNCYWPLNDYGFYTTTGIGYQPYRVVVLSFELLNAPATVCGPKLSTDLIKNQCVNFNFNGLTGTGVLTPSSKRFQPFQQFGRDVSDFTDSVRDPKTSEILDISPCSFGGVSVITPGTNASSEVAVLYQDVNCTDVSTAIHADQLTPAWRIYSTGNNVFQTQAGCLIGAEHVDTSYECDIPIGAGICASYHTVSLLRSTSQKSIVAYTMSLGADSSIAYSNNTIAIPTNFSISITTEVMPVSMAKTSVDCNMYICGDSTECANLLLQYGSFCTQLNRALSGIAAEQDRNTREVFAQVKQMYKTPTLKYFGGFNFSQILPDPLKPTKRSFIEDLLFNKVTLADAGFMKQYGECLGDINARDLICAQKFNGLTVLPPLLTDDMIAAYTAALVSGTATAGWTFGAGAALQIPFAMQMAYRFNGIGVTQNVLYENQKQIANQFNKAISQIQESLTTTSTALGKLQDVVNQNAQALNTLVKQLSSNFGAISSVLNDILSRLDKVEAEVQIDRLITGRLQSLQTYVTQQLIRAAEIRASANLAATKMSECVLGQSKRVDFCGKGYHLMSFPQAAPHGVVFLHVTYVPSQERNFTTAPAICHEGKAYFPREGVFVFNGTSWFITQRNFFSPQIITTDNTFVSGNCDVVIGIINNTVYDPLQPELDSFKEELDKYFKNHTSPDVDLGDISGINASVVNIQKEIDRLNEVAKNLNESLIDLQELGKYEQYIKWPWYVWLGFIAGLIAIVMVTILLCCMTSCCSCLKGACSCGSCCKFDEDDSEPVLKGVKLHYT

SEQ ID NO: 115 - protein, 1353 aa, Middle East respiratory syndrome-related coronavirus
MIHSVFLLMFLLTPTESYVDVGPDSIKSACIEVDIQQTFFDKTWPRPIDVSKADGIIYPQGRTYSNITITYQGLFPYQGDHGDMYVYSAGHATGTTPQKLFVANYSQDVKQFANGFVVRIGAAANSTGTVIISPSTSATIRKIYPAFMLGSSVGNFSDGKMGRFFNHTLVLLPDGCGTLLRAFYCILEPRSGNHCPAGNSYTSFATYHTPATDCSDGNYNRNASLNSFKEYFNLRNCTFMYTYNITEDEILEWFGITQTAQGVHLFSSRYVDLYGGNMFQFATLPVYDTIKYYSIIPHSIRSIQSDRKAWAAFYVYKLQPLTFLLDFSVDGYIRRAIDCGFNDLSQLHCSYESFDVESGVYSVSSFEAKPSGSVVEQAEGVECDFSPLLSGTPPQVYNFKRLVFTNCNYNLTKLLSLFSVNDFTCSQISPAAIASNCYSSLILDYFSYPLSMKSDLSVSSAGPISQFNYKQSFSNPTCLILATVPHNLTTITKPLKYSYINKCSRLLSDDRTEVPQLVNANQYSPCVSIVPSTVWEDGDYYRKQLSPLEGGGWLVASGSTVAMTEQLQMGFGITVQYGTDTNSVCPKLEFANDTKIASQLGNCVEYSLYGVSGRGVFQNCTAVGVRQQRFVYDAYQNLVGYYSDDGNYYCLRACVSVPVSVIYDKETKTHATLFGSVACEHISSTMSQYSRSTRSMLKRRDSTYGPLQTPVGCVLGLVNSSLFVEDCKLPLGQSLCALPDTPSTLTPRSVRSVPGEMRLASIAFNHPIQVDQLNSSYFKLSIPTNFSFGVTQEYIQTTIQKVTVDCKQYVCNGFQKCEQLLREYGQFCSKINQALHGANLRQDDSVRNLFASVKSSQSSPIIPGFGGDFNLTLLEPVSISTGSRSARSAIEDLLFDKVTIADPGYMQGYDDCMQQGPASARDLICAQYVAGYKVLPPLMDVNMEAAYTSSLLGSIAGVGWTAGLSSFAAIPFAQSIFYRLNGVGITQQVLSENQKLIANKFNQALGAMQTGFTTTNEAFHKVQDAVNNNAQALSKLASELSNTFGAISASIGDIIQRLDVLEQDAQIDRLINGRLTTLNAFVAQQLVRSESAALSAQLAKDKVNECVKAQSKRSGFCGQGTHIVSFVVNAPNGLYFMHVGYYPSNHIEVVSAYGLCDAANPTNCIAPVNGYFIKTNNTRIVDEWSYTGSSFYAPEPITSLNTKYVAPQVTYQNISTNLPPPLLGNSTGIDFQDELDEFFKNVSTSIPNFGSLTQINTTLLDLTYEMLSLQQVVKALNESYIDLKELGNYTYYNKWPWYIWLGFIAGLVALALCVFFILCCTGCGTNCMGKLKCNRCCDRYEEYDLEPHKVHVH

SEQ ID NO: 116 - protein, 676 aa, Zaire ebolavirus
MGVTGILQLPRDRFKRTSFFLWVIILFQRTFSIPLGVIHNSTLQVSDVDKLVCRDKLSSTNQLRSVGLNLEGNGVATDVPSATKRWGFRSGVPPKVVNYEAGEWAENCYNLEIKKPDGSECLPAAPDGIRGFPRCRYVHKVSGTGPCAGDFAFHKEGAFFLYDRLASTVIYRGTTFAEGVVAFLILPQAKKDFFSSHPLREPVNATEDPSSGYYSTTIRYQATGFGTNETEYLFEVDNLTYVQLESRFTPQFLLQLNETIYTSGKRSNTTGKLIWKVNPEIDTTIGEWAFWETKKNLTRKIRSEELSFTVVSNGAKNISGQSPARTSSDPGTNTTTEDHKIMASENSSAMVQVHSQGREAAVSHLTTLATISTSPQSLTTKPGPDNSTHNTPVYKLDISEATQVEQHHRRTDNDSTASDTPSATTAAGPPKAENTNTSKSTDFLDPATTTSPQNHSETAGNNNTHHQDTGEESASSGKLGLITNTIAGVAGLITGGRRTRREAIVNAQPKCNPNLHYWTTQDEGAAIGLAWIPYFGPAAEGIYIEGLMHNQDGLICGLRQLANETTQALQLFLRATTELRTFSILNRKAIDFLLQRWGGTCHILGPDCCIEPHDWTKNITDKIDQIIHDFVDKTLPDQGDNDNWWTGWRQWIPAGIGVTGVIIAVIALFCICKFVF

SEQ ID NO: 117 - protein, 681 aa, Lake Victoria marburgvirus
MKTTCFLISLILIQGTKNLPILEIASNNQPQNVDSVCSGTLQKTEDVHLMGFTLSGQKVADSPLEASKRWAFRTGVPPKNVEYTEGEEAKTCYNISVTDPSGKSLLLDPPTNIRDYPKCKTIHHIQGQNPHAQGIALHLWGAFFLYDRIASTTMYRGKVFTEGNIAAMIVNKTVHKMIFSRQGQGYRHMNLTSTNKYWTSSNGTQTNDTGCFGALQEYNSTKNQTCAPSKIPPPLPTARPEIKLTSTPTDATKLNTTDPSSDDEDLATSGSGSGEREPHTTSDAVTKQGLSSTMPPTPSPQPSTPQQGGNNTNHSQDAVTELDKNNTTAQPSMPPHNTTTISTNNTSKHNFSTLSAPLQNTTNDNTQSTITENEQTSAPSITTLPPTGNPTTAKSTSSKKGPATTAPNTTNEHFTSPPPTPSSTAQHLVYFRRKRSILWREGDMFPFLDGLINAPIDFDPVPNTKTIFDESSSSGASAEEDQHASPNISLTLSYFPNINENTAYSGENENDCDAELRIWSVQEDDLAAGLSWIPFFGPGIEGLYTAVLIKNQNNLVCRLRRLANQTAKSLELLLRVTTEERTFSLINRHAIDFLLTRWGGTCKVLGPDCCIGIEDLSKNISEQIDQIKKDEQKEGTGWGLGGKWWTSDWGVLTNLGILLLLSIAVLIALSCICRIFTKYIG

SEQ ID NO: 118 - protein, 630 aa, Hanta virus
LRNVYDMKIECPHTVSFGENSVIGYVELPPVPLADTAQMVPESSCNMDNHQSLNTITKYTQVSWRGKADQSQSSQNSFETVSTEVDLKGTCVLKHKMVEESYRSRKSVTCYDLSCNSTYCKPTLYMIVPIHACNMMKSCLIALGPYRVQVVYERSYCMTGVLIEGKCFVPDQSVVSIIKHGIFDIASVHIVCFFVAVKGNTYKIFEQVKKSFESTCNDTENKVQGYYICIVGGNSAPIYVPTLDDFRSMEAFTGIFRSPHGEDHDLAGEEIASYSIVGPANAKVPHSASSDTLSLIAYSGIPSYSSLSILTSSTEAKHVFSPGLFPKLNHTNCDKSAIPLIWTGMIDLPGYYEAVHPCTVFCVLSGPGASCEAFSEGGIFNITSPMCLVSKQNRFRLTEQQVNFVCQRVDMDIVVYCNGQRKVILTKTLVIGQCIYTITSLFSLLPGVAHSIAVELCVPGFHGWATAALLVTFCFGWVLIPAITFIILTVLKFIANIFHTSNQENRLKSVLRKIKEEFEKTKGSMVCDVCKYECETYKELKAHGVSCPQSQCPYCFTHCEPTEAAFQAHYKVCQVTHRFRDDLKKTVTPQNFTPGCYRTLNLFRYKSRCYIFTMWIFLLVLESILWAASA

SEQ ID NO: 119 - protein, 487 aa, Hanta virus
SETPLTPVWNDNAHGVGSVPMHTDLELDFSLTSSSKYTYRRKLTNPLEEAQSIDLHIEIEEQTIGVDVHALGHWFDGRLNLKTSFHCYGACTKYEYPWHTAKCHYERDYQYETSWGCNPSDCPGVGTGCTACGLYLDQLKPVGSAYKIITIRYSRRVCVQFGEENLCKIIDMNDCFVSRHVKVCIIGTVSKFSQGDTLLFFGPLEGGGLIFKHWCTSTCQFGDPGDIMSPRDKGFLCPEFPGSFRKKCNFATTPICEYDGNMVSGYKKVMATIDSFQSFNTSTMHFTDERIEWKDPDGMLRDHINILVTKDIDFDNLGENPCKIGLQTSSIEGAWGSGVGFTLTCLVSLTECPTFLTSIKACDKAICYGAESVTLTRGQNTVKVSGKGGHSGSTFRCCHGEDCSQIGLHAAAPHLDKVNGISEIENSKVYDDGAPQCGIKCWFVKSGEWISGIFSGNWIVLIVLCVFLLFSLVLLSILCPVRKHKKS

SEQ ID NO: 120 - protein, 226 aa, Hepatitis B virus
MENITSGFLGPLLVLQAGFFLLTKILTIPQSLNSWWTSLSFLGGNTVCLGQNSQSPTSNHSPTSCPPTCPGYRWMCLRRFIIFLFILLLCLIFLLVLLDYQGMLPVCPLIPGSSTTSTGPCRTCKTPAQGTSMYPSCCCTKPSDGNCTCIPIPSSWAFGKFLWEWASARFSWLSLIVPFVQWFVGLSPTVWLSVIWMMWYWGPSLYSILSPFLPLLPIFFCLWVYI

SEQ ID NO: 121 - protein, 617 aa, Measles virus
MSPQRDRINAFYKDNPHPKGSRIVINREHLMIDRPYVLLAVLFVMFLSLIGLLAIAGIRLHRAAIYTAEIHKSLSTNLDVTNSIEHQVKDVLTPLFKIIGDEVGLRTPQRFTDLVKFISDKIKFLNPDREYDFRDLTWCINPPERIKLDYDQYCADVAAEELMNALVNSTLLETRTTNQFLAVSKGNCSGPTTIRGQFSNMSLSLLDLYLGRGYNVSSIVTMTSQGMYGGTYLVEKPNLSSKRSELSQLSMYRVFEVGVIRNPGLGAPVFHMTNYLEQPVSNDLSNCMVALGELKLAALCHGEDSITIPYQGSGKGVSFQLVKLGVWKSPTDMQSWVPLSTDDPVIDRLYLSSHRGVIADNQAKWAVPTTRTDDKLRMETCFQQACKGKIQALCENPEWAPLKDNRIPSYGVLSVDLSLTVELKIKIASGFGPLITHGSGMDLYKSNHNNVYWLTIPPMKNLALGVINTLEWIPRFKVSPYLFNVPIKEAGEDCHAPTYLPAEVDGDVKLSSNLVILPGQDLQYVLATYDTSRVEHAVVYYVYSPSRSFSYFYPFRLPIKGVPIELQVECFTWDQKLWCRHFCVLADSESGGHITHSGMEGMGVSCTVTREDGTNRR

SEQ ID NO: 122 - protein, 550 aa, Measles virus
MGLKVNVSAIFMAVLLTLQTPTGQIHWGNLSKIGVVGIGSASYKVMTRSSHQSLVIKLMPNITLLNNCTRVEIAEYRRLLRTVLEPIRDALNAMTQNIRPVQSVASSRRHKRFAGVVLAGAALGVATAAQITAGIALHQSMLNSQAIDNLRASLETTNQAIEAIRQAGQEMILAVQGVQDYINNELIPSMNQLSCDLIGQKLGLKLLRYYTEILSLFGPSLRDPISAEISIQALSYALGGDINKVLEKLGYSGGDLLGILESRGIKARITHVDTESYFIVLSIAYPTLSEIKGVIVHRLEGVSYNIGSQEWYTTVPKYVATQGYLISNFDESSCTFMPEGTVCSQNALYPMSPLLQECLRGSTKSCARTLVSGSFGNRFILSQGNLIANCASILCKCYTTGTIINQDPDKILTYIAADHCPVVEVNGVTIQVGSRRYPDAVYLHRIDLGPPISLERLDVGTNLGNAIAKLEDAKELLESSDQILRSMKGLSSTSIVYILIAVCLGGLIGIPALICCCRGRCNKKGEQVGMSRPGLKPDLTGTSKSYVRSL

SEQ ID NO: 123 - protein, 500 aa, Zika virus
IRCIGVSNRDFVEGMSGGTWVDVVLEHGGCVTVMAQDKPTVDIELVTTTVSNMAEVRSYCYEASISDMASDSRCPTQGEAYLDKQSDTQYVCKRTLVDRGWGNGCGLFGKGSLVTCAKFTCSKKMTGKSIQPENLEYRIMLSVHGSQHSGMIGYETDEDRAKVEVTPNSPRAEATLGGFGSLGLDCEPRTGLDFSDLYYLTMNNKHWLVHKEWFHDIPLPWHAGADTGTPHWNNKEALVEFKDAHAKRQTVVVLGSQEGAVHTALAGALEAEMDGAKGRLFSGHLKCRLKMDKLRLKGVSYSLCTAAFTFTKVPAETLHGTVTVEVQYAGTDGPCKIPVQMAVDMQTLTPVGRLITANPVITESTENSKMMLELDPPFGDSYIVIGVGDKKITHHWHRSGSTIGKAFEATVRGAKRMAVLGDTAWDFGSVGGVFNSLGKGIHQIFGAAFKSLFGGMSWFSQILIGTLLVWLGLNTKNGSISLTCLALGGVMIFLSTAVSA

SEQ ID NO: 124 - protein, 378 aa, Plasmodium vivax
MKNFILLAVSSILLVDLFPTHCGHNVDLSKAINLNGVNFNNVDASSLGAAHVGQSASRGRGLGENPDDEEGDAKKKKDGKKAEPKNPRENKLKQPGDRADGQPAGDRADGQPAGDRADGQPAGDRAAGQPAGDRADGQPAGDRADGQPAGDRADGQPAGDRADGQPAGDRAAGQPAGDRAAGQPAGDRADGQPAGDRAAGQPAGDRADGQPAGDRAAGQPAGDRADGQPAGDRAAGQPAGDRAAGQPAGDRAAGQPAGDRAAGQPAGNGAGGQAAGGNAGGGQGQNNEGANAPNEKSVKEYLDKVRATVGTEWTPCSVTCGVGVRVRRRVNAANKKPEDLTLNDLETDVCTMDKCAGIFNVVSNSLGLVILLVLALFN

SEQ ID NO: 125 - protein, 546 aa, Nipah virus
MVVILDKRCYCNLLILILMISECSVGILHYEKLSKIGLVKGVTRKYKIKSNPLTKDIVIKMIPNVSNMSQCTGSVMENYKTRLNGILTPIKGALEIYKNNTHDLVGDVRLAGVIMAGVAIGIATAAQITAGVALYEAMKNADNINKLKSSIESTNEAVVKLQETAEKTVYVLTALQDYINTNLVPTIDKISCKQTELSLDLALSKYLSDLLFVFGPNLQDPVSNSMTIQAISQAFGGNYETLLRTLGYATEDFDDLLESDSITGQIIYVDLSSYYIIVRVYFPILTEIQQAYIQELLPVSFNNDNSEWISIVPNFILVRNTLISNIEIGFCLITKRSVICNQDYATPMTNNMRECLTGSTEKCPRELVVSSHVPRFALSNGVLFANCISVTCQCQTTGRAISQSGEQTLLMIDNTTCPTAVLGNVIISLGKYLGSVNYNSEGIAIGPPVFTDKVDISSQISSMNQSLQQSKDYIKEAQRLLDTVNPSLISMLSMIILYVLSIASLCIGLITFISFIIVEKKRNTYSRLEDRRVRPTSSGDLYYIGT

SEQ ID NO: 126 - protein, 602 aa, Nipah virus
MPAENKKVRFENTTSDKGKIPSKVIKSYYGTMDIKKINEGLLDSKILSAFNTVIALLGSIVIIVMNIMIIQNYTRSTDNQAVIKDALQGIQQQIKGLADKIGTEIGPKVSLIDTSSTITIPANIGLLGSKISQSTASINENVNEKCKFTLPPLKIHECNISCPNPLPFREYRPQTEGVSNLVGLPNNICLQKTSNQILKPKLISYTLPVVGQSGTCITDPLLAMDEGYFAYSHLERIGSCSRGVSKQRIIGVGEVLDRGDEVPSLFMTNVWTPPNPNTVYHCSAVYNNEFYYVLCAVSTVGDPILNSTYWSGSLMMTRLAVKPKSNGGGYNQHQLALRSIEKGRYDKVMPYGPSGIKQGDTLYFPAVGFLVRTEFKYNDSNCPITKCQYSKPENCRLSMGIRPNSHYILRSGLLKYNLSDGENPKVVFIEISDQRLSIGSPSKIYDSLGQPVFYQASFSWDTMIKFGDVLTVNPLVVNWRNNTVISRPGQSQCPRFNTCPEICWEGVYNDAFLIDRINWISAGVFLDSNQTAENPVFTVFKDNEILYRAQLASEDTNAQKTITNCFLLKNKIWCISLVEIYDTGDNVIRPKLFAVKIPEQCT

SEQ ID NO: 127 - protein, 775 aa, Rotavirus A
MASLIYRQLLTNSYSVDLHDEIEQIGSEKTQNVTINPSPFAQTRYAPVNWGHGEINDSTTVEPILDGPYQPTTFTPPNDYWILINSNTNGVVYESTNNSDFWTAVVAIEPHVNPVDRQYTIFGESKQFNVSNDSNKWKFLEMFRSSSQNEFYNRRTLTSDTRFVGILKYGGRVWTFHGETPRATTDSSSTANLNNISITIHSEFYIIPRSQESKCNEYINNGLPPIQNTRNVVPLPLSSRSIQYKRAQVNEDIIVSKTSLWKEMQYNRDIIIRFKFGNSIVKMGGLGYKWSEISYKAANYQYNYLRDGEQVTAHTTCSVNGVNNFSYNGGSLPTDFGISRYEVIKENSYVYVDYWDDSKAFRNMVYVRSLAANLNSVKCTGGSYNFSIPVGAWPVMNGGAVSLHFAGVTLSTQFTDFVSLNSLRFRFSLTVDEPPFSILRTRTVNLYGLPAANPNNGNEYYEISGRFSLIYLVPTNDDYQTPIMNSVTVRQDLERQLTDLREEFNSLSQEIAMAQLIDLALLPLDMFSMFSGIKSTIDLTKSMATSVMKKFRKSKLATSISEMTNSLSDAASSASRNVSIRSNLSAISNWTNVSNDVSNVTNSLNDISTQTSTISKKFRLKEMITQTEGMSFDDISAAVLKTKIDMSTQIGKNTLPDIVTEASEKFIPKRSYRILKDDEVMEINTEGKFFAYKINTFDEVPFDVNKFAELVTDSPVISAIIDFKTLKNLNDNYGITRTEALNLIKSNPNMLRNFINQNNPIIRNRIEQLILQCKL

SEQ ID NO: 128 - protein, 230 aa, Rotavirus A
MASLIYRQLLTNSYSVDLHDEIEQIGSEKTQNVTINPSPFAQTRYAPVNWGHGEINDSTTVEPILDGPYQPTTFTPPNDYWILINSNTNGVVYESTNNSDFWTAVVAIEPHVNPVDRQYTIFGESKQFNVSNDSNKWKFLEMFRSSSQNEFYNRRTLTSDTRFVGILKYGGRVWTFHGETPRATTDSSSTANLNNISITIHSEFYIIPRSQESKCNEYINNGLPPIQNTR

SEQ ID NO: 129 - protein, 539 aa, Human metapneumovirus
MSWKVVIIFSLLITPQHGLKESYLEESCSTITEGYLSVLRTGWYTNVFTLEVGDVENLTCSDGPSLIKTELDLTKSALRELKTVSADQLAREEQIENPRQSRFVLGAIALGVATAAAVTAGVAIAKTIRLESEVTAIKNALKTTNEAVSTLGNGVRVLATAVRELKDFVSKNLTRAINKNKCDIDDLKMAVSFSQFNRRFLNVVRQFSDNAGITPAISLDLMTDAELARAVSNMPTSAGQIKLMLENRAMVRRKGFGILIGVYGSSVIYMVQLPIFGVIDTPCWIVKAAPSCSGKKGNYACLLREDQGWYCQNAGSTVYYPNEKDCETRGDHVFCDTAAGINVAEQSKECNINISTTNYPCKVSTGRHPISMVALSPLGALVACYKGVSCSIGSNRVGIIKQLNKGCSYITNQDADTVTIDNTVYQLSKVEGEQHVIKGRPVSSSFDPIKFPEDQFNVALDQVFENIENSQALVDQSNRILSSAEKGNTGFIIVIILIAVLGSSMILVSIFIIIKKTKKPTGAPPELSGVTNNGFIPHS

SEQ ID NO: 130 - protein, 219 aa, Human metapneumovirus
MEVKVENIRAIDMLKARVKNRVARSKCFKNASLILIGITTLSIALNIYLIINYTIQKTSSESEHHTSSPPTESNKEASTISTDNPDINPNSQHPTQQSTENPTLNPAASVSPSETEPASTPDTTNRLSSVDRSTAQPSESRTKTKPTVHTRNNPSTASSTQSPPRATTKAIRRATTFRMSSTGKRPTTTSVQSDSSTTTQNHEETGSANPQASVSTMQN

SEQ ID NO: 131 - protein, 555 aa, Human parainfluenza virus
MQKSEILFLIYSSLLLSSSLCQIPVDKLSNVGVIINEGKLLKIAGSYESRYIVLSLVPSIDLEDGCGTTQIIQYKNLLNRLLIPLKDALDLQESLITITNDTTVTNDNPQSRFFGAVIGTIALGVATAAQITAGIALAEAREARKDIALIKDSIIKTHNSVELIQRGIGEQIIALKTLQDFVNNEIRPAIGELRCETTALKLGIKLTQHYSELATAFSSNLGTIGEKSLTLQALSSLYSANITEILSTIKKDKSDIYDIIYTEQVKGTVIDVDLEKYMVTLLVKIPILSEIPGVLIYRASSISYNIEGEEWHVAIPNYIINKASSLGGADVTNCIESRLAYICPRDPTQLIPDNQQKCILGDVSKCPVTKVINNLVPKFAFINGGVVANCIASTCTCGTNRIPVNQDRSRGVTFLTYTNCGLIGINGIELYANKRGRDTTWGNQIIKVGPAVSIRPVDISLNLASATNFLEESKIELMKAKAIISAVGGWHNTESTQIIIIIIVCILIIIICGILYYLYRVRRLLVMINSTHNSPVNTYTLESRMRNPYIGNNSN

SEQ ID NO: 132 - protein, 571 aa, Human parainfluenza virus
MEDYSNLSLKSIPKRTCRIIFRTATILGICTLIVLCSSILHEIIHLDVSSGLMDSDDSQQGIIQPIIESLKSLIALANQILYNVAIIIPLKIDSIETVIFSALKDMHTGSMSNTNCTPGNLLLHDAAYINGINKFLVLKSYNGTPKYGPLLNIPSFIPSATSPNGCTRIPSFSLIKTHWCYTHNVMLGDCLDFTTSNQYLAMGIIQQSAAAFPIFRTMKTIYLSDGINRKSCSVTAIPGGCVLYCYVATRSEKEDYATTDLAELRLAFYYYNDTFIERVISLPNTTGQWATINPAVGSGIYHLGFILFPVYGGLISGTPSYNKQSSRYFIPKHPNITCAGNSSEQAAAARSSYVIRYHSNRLIQSAVLICPLSDMHTARCNLVMFNNSQVMMGAEGRLYVIDNNLYYYQRSSSWWSASLFYRINTDFSKGIPPIIEAQWVPSYQVPRPGVMPCNATSFCPANCITGVYADVWPLNDPEPTSQNALNPNYRFAGAFLRNESNRTNPTFYTASASALLNTTGFNNTNHKAAYTSSTCFKNTGTQKIYCLIIIEMGSSLLGEFQIIPFLRELIP

SEQ ID NO: 133 - protein, 217 aa, Plasmodium falciparum
MNKLYSLFLFLFIQLSIKYNNAKVTVDTVCKRGFLIQMSGHLECKCENDLVLVNEETCEEKVLKCDEKTVNKPCGDFSKCIKIDGNPVSYACKCNLGYDMVNNVCIPNECKNVTCGNGKCILDTSNPVKTGVCSCNIGKVPNVQDQNKCSKDGETKCSLKCLKENETCKAVDGIYKCDCKDGFIIDNESSICTAFSAYNILNLSIMFILFSVCFFIM

SEQ ID NO: 134 - protein, 274 aa, Neisseria meningitidis
MNRTAFCCLSLTTALILTACSSGGGGVAADIGAGLADALTAPLDHKDKGLQSLTLDQSVRKNEKLKLAAQGAEKTYGNGDSLNTGKLKNDKVSRFDFIRQIEVDGQLITLESGEFQVYKQSHSALTAFQTEQIQDSEHSGKMVAKRQFRIGDIAGEHTSFDKLPEGGRATYRGTAFGSDDAGGKLTYTIDFAAKQGNGKIEHLKSPELNVDLAAADIKPDGKRHAVISGSVLYNQAEKGSYSLGIFGGKAQEVAGSAEVKTVNGIRHIGLAAKQ

SEQ ID NO: 135 - protein, 370 aa, Neisseria meningitidis
MQTAARRSFDYDMPLIQTPTSACQIRQAWAKVADTPDRETAGRLKDEIKALLKETNAVLVAHYYVDPLIQDLALETGGCVGDSLEMARFGAEHEAGTLVVAGVRFMGESAKILCPEKTVLMPDLEAECSLDLGCPEEAFSAFCDQHPDRTVVVYANTSAAVKARADWVVTSSVALEIVSYLKSRGEKLIWGPDRHLGDYIRRETGADMLLWQGSCIVHNEFKGQELAALKAEHPDAVVLVHPESPQSVIELGDVVGSTSKLLKAAVSRPEKKFIVATDLGILHEMQKQAPDKQFIAAPTAGNGGSCKSCAFCPWMAMNSLGGIKYALTSGHNEILLDRKLGEAAKLPLQRMLDFAAGLKRGDVFNGMGPA

SEQ ID NO: 136 - protein, 492 aa, Neisseria meningitidis
MFKRSVIAMACIFALSACGGGGGGSPDVKSADTLSKPAAPVVSEKETEAKEDAPQAGSQGQGAPSAQGGQDMAAVSEENTGNGGAAATDKPKNEDEGAQNDMPQNAADTDSLTPNHTPASNMPAGNMENQAPDAGESEQPANQPDMANTADGMQGDDPSAGGENAGNTAAQGTNQAENNQTAGSQNPASSTNPSATNSGGDFGRTNVGNSVVIDGPSQNITLTHCKGDSCSGNNFLDEEVQLKSEFEKLSDADKISNYKKDGKNDGKNDKFVGLVADSVQMKGINQYIIFYKPKPTSFARFRRSARSRRSLPAEMPLIPVNQADTLIVDGEAVSLTGHSGNIFAPEGNYRYLTYGAEKLPGGSYALRVQGEPSKGEMLAGTAVYNGEVLHFHTENGRPSPSRGRFAAKVDFGSKSVDGIIDSGDGLHMGTQKFKAAIDGNGFKGTWTENGGGDVSGKFYGPAGEEVAGKYSYRPTDAEKGGFGVFAGKKEQD

SEQ ID NO: 137 - protein, 716 aa, Artificial Sequence
  Synthetic Peptide - hMPV-compA fusion construct
MSWKVVIIFSLLITPQHGLKESYLEESCSTITEGYLSVLRTGWYTNVFTLEVGDVENLTCADGPSLIKTELDLTKSALRELRTVSADQLAREEQIENPRRRRFVLGAIALGVATAAAVTAGVAIAKTIRLESEVTAIKNALKKTNEAVSTLGNGVRVLATAVRELKDFVSKNLTRAINKNKCDIPDLKMAVSFSQFNRRFLNVVRQFSDNAGITPAISLDLMTDAELARAVSNMPTSAGQIKLMLENRAMVRRKGFGFLIGVYGSSVIYMVQLPIFGVIDTPCWIVKAAPSCSGKKGNYACLLREDQGWYCQNAGSTVYYPNEKDCETRGDHVFCDTAAGINVAEQSKECNINISTTNYPCKVSTGRHPISMVALSPLGALVACYKGVSCSIGSNRVGIIKQLNKGCSYITNQDADTVTIDNTVYQLSKVEGEQHVIKGRPVSSSFDPVKFPEDQFNVALDQVFESIENSQALVDQSNRILGSGGSGSGSGGSEKAAKAEEAARKMEELFKKHKIVAVLRANSVEEAIEKAVAVFAGGVHLIEITFTVPDADTVIKALSVLKEKGAIIGAGTVTSVEQARKAVESGAEFIVSPHLDEEISQFAKEKGVFYMPGVMTPTELVKAMKLGHTILKLFPGEVVGPQFVKAMKGPFPNVKFVPTGGVNLDNVAEWFKAGVLAVGVGSALVKGTPDEVREKAKAFVEKIRGATELEHHHHHH

SEQ ID NO: 138 - protein, 707 aa, Artificial Sequence
  Synthetic Peptide - hMPV-compA fusion construct
MSWKVVIIFSLLITPQHGLKESYLEESCSTITEGYLSVLRTGWYTNVFTLEVGDVENLTCADGPSLIKTELDLTKSALRELRTVSADQLAREEQIENPRRRRFVLGAIALGVATAAAVTAGVAIAKTIRLESEVTAIKNALKKTNEAVSTLGNGVRVLATAVRELKDFVSKNLTRAINKNKCDIPDLKMAVSFSQFNRRFLNVVRQFSDNAGITPAISLDLMTDAELARAVSNMPTSAGQIKLMLENRAMVRRKGFGFLIGVYGSSVIYMVQLPIFGVIDTPCWIVKAAPSCSGKKGNYACLLREDQGWYCQNAGSTVYYPNEKDCETRGDHVFCDTAAGINVAEQSKECNINISTTNYPCKVSTGRHPISMVALSPLGALVACYKGVSCSIGSNRVGIIKQLNKGCSYITNQDADTVTIDNTVYQLSKVEGEQHVIKGRPVSSSFDPVKFPEDQFNVALDQVFESIENSQAGSGGSGSGSGGSEKAAKAEEAARKMEELFKKHKIVAVLRANSVEEAIEKAVAVFAGGVHLIEITFTVPDADTVIKALSVLKEKGAIIGAGTVTSVEQARKAVESGAEFIVSPHLDEEISQFAKEKGVFYMPGVMTPTELVKAMKLGHTILKLFPGEVVGPQFVKAMKGPFPNVKFVPTGGVNLDNVAEWFKAGVLAVGVGSALVKGTPDEVREKAKAFVEKIRGATELEHHHHHH

SEQ ID NO: 139 - protein, 725 aa, Artificial Sequence
  Synthetic Peptide - hMPV-compA fusion construct
MSWKVVIIFSLLITPQHGLKESYLEESCSTITEGYLSVLRTGWYTNVFTLEVGDVENLTCADGPSLIKTELDLTKSALRELRTVSADQLAREEQIENPRRRRFVLGAIALGVATAAAVTAGVAIAKTIRLESEVTAIKNALKKTNEAVSTLGNGVRVLATAVRELKDFVSKNLTRAINKNKCDIPDLKMAVSFSQFNRRFLNVVRQFSDNAGITPAISLDLMTDAELARAVSNMPTSAGQIKLMLENRAMVRRKGFGFLIGVYGSSVIYMVQLPIFGVIDTPCWIVKAAPSCSGKKGNYACLLREDQGWYCQNAGSTVYYPNEKDCETRGDHVFCDTAAGINVAEQSKECNINISTTNYPCKVSTGRHPISMVALSPLGALVACYKGVSCSIGSNRVGIIKQLNKGCSYITNQDADTVTIDNTVYQLSKVEGEQHVIKGRPVSSSFDPVKFPEDQFNVALDQVFESIENSQALVDQSNRILSSAEKGNTGGSGGSGSGSGGSEKAAKAEEAARKMEELFKKHKIVAVLRANSVEEAIEKAVAVFAGGVHLIEITFTVPDADTVIKALSVLKEKGAIIGAGTVTSVEQARKAVESGAEFIVSPHLDEEISQFAKEKGVFYMPGVMTPTELVKAMKLGHTILKLFPGEVVGPQFVKAMKGPFPNVKFVPTGGVNLDNVAEWFKAGVLAVGVGSALVKGTPDEVREKAKAFVEKIRGATELEHHHHHH

SEQ ID NO: 140 - protein, 707 aa, Artificial Sequence
  Synthetic Peptide - hMPV-compA fusion construct
MSWKVVIIFSLLITPQHGLKESYLEESCSTITEGYLSVLRTGWYTNVFTLEVGDVENLTCADGPSLIKTELDLTKSALRELRTVSADQLAREEQIENPRRRRFVLGAIALGVATAAAVTAGVAIAKTIRLESEVTAIKNALKKTNEAVSTLGNGVRVLATAVRELKDFVSKNLTRAINKNKCDIADLKMAVSFSQFNRRFLNVVRQFSDNAGITPAISLDLMTDAELARAVSNMPTSAGQIKLMLENRAMVRRKGFGFLIGVYGSSVIYMVQLPIFGVIDTPCWIVKAAPSCSGKKGNYACLLREDQGWYCQNAGSTVYYPNEKDCETRGDHVFCDTAAGINVAEQSKECNINISTTNYPCKVSTGRHPISMVALSPLGALVACYKGVSCSIGSNRVGIIKQLNKGCSYITNQDADTVTIDNTVYQLSKVEGEQHVIKGRPVSSSFDPVKFPEDQFNVALDQVFESIENSQAGSGGSGSGSGGSEKAAKAEEAARKMEELFKKHKIVAVLRANSVEEAIEKAVAVFAGGVHLIEITFTVPDADTVIKALSVLKEKGAIIGAGTVTSVEQARKAVESGAEFIVSPHLDEEISQFAKEKGVFYMPGVMTPTELVKAMKLGHTILKLFPGEVVGPQFVKAMKGPFPNVKFVPTGGVNLDNVAEWFKAGVLAVGVGSALVKGTPDEVREKAKAFVEKIRGATELEHHHHHH

SEQ ID NO: 141 - protein, 707 aa, Artificial Sequence
  Synthetic Peptide - hMPV-compA fusion construct
MSWKVVIIFSLLITPQHGLKESYLEESCSTITEGYLSVLRTGWYTNVFTLEVGDVENLTCADGPSLIKTELDLTKSALRELRTVSADQLAREEQIENPRRRRFVLGAIALGVATAAAVTAGVAIAKCIRLESEVTAIKNALKKTNEAVSTLGCGVRVLATAVRELKDFVSKNLTRAINKNKCDIPDLKMAVSFSQFNRRFLNVVRQFSDNAGITPAISLDLMTDAELARAVSNMPTSAGQIKLMLENRAMVRRKGFGILIGVYGSSVIYMVQLPIFGVIDTPCWIVKAAPSCSGKKGNYACLLREDQGWYCQNAGSTVYYPNEKDCETRGDHVFCDTAAGINVAEQSKECNINISTTNYPCKVSTGRNPISMVALSPLGALVACYKGVSCSIGSNRVGIIKQLNKGCSYITNQDADTVTIDNTVYQLSKVEGEQHVIKGRPVSSSFDPVKFPEDQFNVALDQVFESIENSQAGSGGSGSGSGGSEKAAKAEEAARKMEELFKKHKIVAVLRANSVEEAIEKAVAVFAGGVHLIEITFTVPDADTVIKALSVLKEKGAIIGAGTVTSVEQARKAVESGAEFIVSPHLDEEISQFAKEKGVFYMPGVMTPTELVKAMKLGHTILKLFPGEVVGPQFVKAMKGPFPNVKFVPTGGVNLDNVAEWFKAGVLAVGVGSALVKGTPDEVREKAKAFVEKIRGATELEHHHHHH

SEQ ID NO: 142 - protein, 707 aa, Artificial Sequence
  Synthetic Peptide - hMPV-compA fusion construct
MSWKVMIIISLLITPQHGLKESYLEESCSTITEGYLSVLRTGWYTNVFTLEVGDVENLTCTDGPSLIKTELDLTKSALRELKTCSADQLAREEQIEGGGGGGFVLGAIALGVATAAAVTAGIAIAKTIRLESEVNAIKGCLKTTNECVSTLGNGVRVLATAVRELKEFVSKNLTSAINKNKCDIADLKMAVSFSQFNRRFLNVVRQFSDNAGITPAISLDLMTDAELARAVSYMPTSAGQIKLMLENRCMVRRKGFGILIGVYGSSVIYMVQLPIFGVIDTPCWIIKAAPSCSEKDGNYACLLREDQGWYCKNAGSTVYYPNDKDCETRGDHVFCDTAAGINVAEQSRECNINISTTNYPCKVSTGRHPISMVALSPLGALVACYKGVSCSIGSNRVGIIKQLPKGCSYITNQDADTVTIDNTVYQLSKVEGEQHVIKGRPVSSSFDPIKFPEDQFNVALDQVFESIENSQAGSGGSGSGSGGSEKAAKAEEAARKMEELFKKHKIVAVLRANSVEEAIEKAVAVFAGGVHLIEITFTVPDADTVIKALSVLKEKGAIIGAGTVTSVEQARKAVESGAEFIVSPHLDEEISQFAKEKGVFYMPGVMTPTELVKAMKLGHTILKLFPGEVVGPQFVKAMKGPFPNVKFVPTGGVNLDNVAEWFKAGVLAVGVGSALVKGTPDEVREKAKAFVEKIRGATELEHHHHHH

SEQ ID NO: 143 - protein, 723 aa, Artificial Sequence
  Synthetic Peptide - hMPV-compA fusion construct
MSWKVMIIISLLITPQHGLKESYLEESCSTITEGYLSVLRTGWYTNVFTLEVGDVENLTCTDGPSLIKTELDLTKSALRELKTCSADQLAREEQIEGGGGGGFVLGAIALGVATAAAVTAGIAIAKTIRLESEVNAIKGCLKTTNECVSTLGNGVRVLATAVRELKEFVSKNLTSAINKNKCDIADLKMAVSFSQFNRRFLNVVRQFSDNAGITPAISLDLMTDAELARAVSYMPTSAGQIKLMLENRCMVRRKGFGILIGVYGSSVIYMVQLPIFGVIDTPCWIIKAAPSCSEKDGNYACLLREDQGWYCKNAGSTVYYPNDKDCETRGDHVFCDTAAGINVAEQSRECNINISTTNYPCKVSTGRHPISMVALSPLGALVACYKGVSCSIGSNRVGIIKQLPKGCSYITNQDADTVTIDNTVYQLSKVEGEQHVIKGRPVSSSFDPIKFPEDQFNVALDQVFESIENSQALVDQSNKILNSAESAIGSGGSGSGSGGSEKAAKAEEAARKMEELFKKHKIVAVLRANSVEEAIEKAVAVFAGGVHLIEITFTVPDADTVIKALSVLKEKGAIIGAGTVTSVEQARKAVESGAEFIVSPHLDEEISQFAKEKGVFYMPGVMTPTELVKAMKLGHTILKLFPGEVVGPQFVKAMKGPFPNVKFVPTGGVNLDNVAEWFKAGVLAVGVGSALVKGTPDEVREKAKAFVEKIRGATELEHHHHHH

SEQ ID NO: 144 - protein, 707 aa, Artificial Sequence
  Synthetic Peptide - hMPV-compA fusion construct
MSWKVMIIISLLITPQHGLKESYLEESCSTITEGYLSVLRTGWYTNVFTLEVGDVENLTCTDCPSLIKTELDLTKSALRELKTVSADQLAREEQIEGGGGGGFVLGAIALGVATAAAVTAGIAIAKTIRLESEVNAIKGCLKTTNECVSTLGNGVRVLATAVRELKEFVSKNLTSAINKNKCDIADLCMAVSFSQFNRRFLNVVRQFSDNAGITPAISLDLMTDAELARAVSYMPTSAGQIKLMLENRAMVRRKGFGILIGVYGSSVIYMVQLPIFGVIDTPCWIIKAAPSCSEKDGNYACLLREDQGWYCKNAGSTVYYPNDKDCETRGDHVFCDTAAGINVAEQSRECNINISTTNYPCKVSTGRHPISMVALSPLGALVACYKGVSCSIGSNRVGIIKQLPKGCSYITNQDADTVTIDNTVYQLSKVEGEQHVIKGRPVSSSFDPICFPEDQFNVALDQVFESIENCQAGSGGSGSGSGGSEKAAKAEEAARKMEELFKKHKIVAVLRANSVEEAIEKAVAVFAGGVHLIEITFTVPDADTVIKALSVLKEKGAIIGAGTVTSVEQARKAVESGAEFIVSPHLDEEISQFAKEKGVFYMPGVMTPTELVKAMKLGHTILKLFPGEVVGPQFVKAMKGPFPNVKFVPTGGVNLDNVAEWFKAGVLAVGVGSALVKGTPDEVREKAKAFVEKIRGATELEHHHHHH

SEQ ID NO: 145 - protein, 723 aa, Artificial Sequence
  Synthetic Peptide - hMPV-compA fusion construct
MSWKVMIIISLLITPQHGLKESYLEESCSTITEGYLSVLRTGWYTNVFTLEVGDVENLTCTDCPSLIKTELDLTKSALRELKTVSADQLAREEQIEGGGGGGFVLGAIALGVATAAAVTAGIAIAKTIRLESEVNAIKGCLKTTNECVSTLGNGVRVLATAVRELKEFVSKNLTSAINKNKCDIADLCMAVSFSQFNRRFLNVVRQFSDNAGITPAISLDLMTDAELARAVSYMPTSAGQIKLMLENRAMVRRKGFGILIGVYGSSVIYMVQLPIFGVIDTPCWIIKAAPSCSEKDGNYACLLREDQGWYCKNAGSTVYYPNDKDCETRGDHVFCDTAAGINVAEQSRECNINISTTNYPCKVSTGRHPISMVALSPLGALVACYKGVSCSIGSNRVGIIKQLPKGCSYITNQDADTVTIDNTVYQLSKVEGEQHVIKGRPVSSSFDPICFPEDQFNVALDQVFESIENCQALVDQSNKILNSAESAIGSGGSGSGSGGSEKAAKAEEAARKMEELFKKHKIVAVLRANSVEEAIEKAVAVFAGGVHLIEITFTVPDADTVIKALSVLKEKGAIIGAGTVTSVEQARKAVESGAEFIVSPHLDEEISQFAKEKGVFYMPGVMTPTELVKAMKLGHTILKLFPGEVVGPQFVKAMKGPFPNVKFVPTGGVNLDNVAEWFKAGVLAVGVGSALVKGTPDEVREKAKAFVEKIRGATELEHHHHHH

SEQ ID NO: 146 - protein, 706 aa, Artificial Sequence
  Synthetic Peptide - hMPV-compA fusion construct
MSWKVVIIFSLLITPQHGLKESYLEESCSTITEGYLSVLRTGWYTNVFTLEVGDVENLTCSDCPSLIKTELDLTKSALRELKTVSADQLAREEQIEGGGGGGFVLAIALGVATAAAVTAGVAIAKTIRLESEVTAIKNCLKTTNECVSTLGNGVRVLATAVRELKDFVSKNLTSAINKNKCDIDDLCMAVSFSQFNRRFLNVVRQFSDNAGITPAISLDLMTDAELARAVSNMPTSAGQIKLMLENRAMVRRKGFGILIGVYGSSVIYMVQLPIFGVIDTPCWIIKAAPSCSGKKGNYACLLREDQGWYCQNAGSTVYYPNEKDCETRGDHVFCDTAAGINVAEQSKECNINISTTNYPCKVSTGRHPISMVALSPLGALVACYKGVSCSIGSNRVGIIKQLNKGCSYITNQDADTVTIDNTVYQLSKVEGEQHVIKGRPVSSSFDPIKFPEDQFNVALDQVFENIENSQAGSGGSGSGSGGSEKAAKAEEAARKMEELFKKHKIVAVLRANSVEEAIEKAVAVFAGGVHLIEITFTVPDADTVIKALSVLKEKGAIIGAGTVTSVEQARKAVESGAEFIVSPHLDEEISQFAKEKGVFYMPGVMTPTELVKAMKLGHTILKLFPGEVVGPQFVKAMKGPFPNVKFVPTGGVNLDNVAEWFKAGVLAVGVGSALVKGTPDEVREKAKAFVEKIRGATELEHHHHHH

SEQ ID NO: 147 - protein, 722 aa, Artificial Sequence
  Synthetic Peptide - hMPV-compA fusion construct
MSWKVVIIFSLLITPQHGLKESYLEESCSTITEGYLSVLRTGWYTNVFTLEVGDVENLTCSDCPSLIKTELDLTKSALRELKTVSADQLAREEQIEGGGGGGFVLAIALGVATAAAVTAGVAIAKTIRLESEVTAIKNCLKTTNECVSTLGNGVRVLATAVRELKDFVSKNLTSAINKNKCDIDDLCMAVSFSQFNRRFLNVVRQFSDNAGITPAISLDLMTDAELARAVSNMPTSAGQIKLMLENRAMVRRKGFGILIGVYGSSVIYMVQLPIFGVIDTPCWIIKAAPSCSGKKGNYACLLREDQGWYCQNAGSTVYYPNEKDCETRGDHVFCDTAAGINVAEQSKECNINISTTNYPCKVSTGRHPISMVALSPLGALVACYKGVSCSIGSNRVGIIKQLNKGCSYITNQDADTVTIDNTVYQLSKVEGEQHVIKGRPVSSSFDPIKFPEDQFNVALDQVFENIENSQALVDQSNRILSSAESAIGSGGSGSGSGGSEKAAKAEEAARKMEELFKKHKIVAVLRANSVEEAIEKAVAVFAGGVHLIEITFTVPDADTVIKALSVLKEKGAIIGAGTVTSVEQARKAVESGAEFIVSPHLDEEISQFAKEKGVFYMPGVMTPTELVKAMKLGHTILKLFPGEVVGPQFVKAMKGPFPNVKFVPTGGVNLDNVAEWFKAGVLAVGVGSALVKGTPDEVREKAKAFVEKIRGATELEHHHHHH

SEQ ID NO: 148 - protein, 707 aa, Artificial Sequence
  Synthetic Peptide - hMPV-compA fusion construct
MSWKVMIIISLLITPQHGLKESYLEESCSTITEGYLSVLRTGWYTNVFTLEVGDVENLTCTDGPSLIKTELDLTKSALRELKTVSADQLAREEQIENPRKARFVLGAIALGVCTAAAVTCGIAIAKTIRLESEVNAIKGALKTTNEAVSTLGNGVRVLAFAVRELKEFVSKNLTSALNKNKCDIADLKMAVSFSQFNRRFLNVVRQFSDNAGITPAISLDLMTDAELARAVSYMPTSAGQIKLMLENRAMVRRKGFGILIGVYGSSVIYMVQLPIFGVIDTPCWIIKAAPSCSEKDGNYACLLREDQGWYCKNAGSTVYYPNDKDCETRGDHVFCDTACGINVAEQSRECNINISTTNYPCKVSTGRHPISMVALSPLGALVACYKGVSCSIGSNRVGIIKQLPKGCSYITNQDADTVTIDNTVYCLSKVEGEQHVIKGRPVSSSFDPIKFPEDQFNVALDQVFESIENSQAGSGGSGSGSGGSEKAAKAEEAARKMEELFKKHKIVAVLRANSVEEAIEKAVAVFAGGVHLIEITFTVPDADTVIKALSVLKEKGAIIGAGTVTSVEQARKAVESGAEFIVSPHLDEEISQFAKEKGVFYMPGVMTPTELVKAMKLGHTILKLFPGEVVGPQFVKAMKGPFPNVKFVPTGGVNLDNVAEWFKAGVLAVGVGSALVKGTPDEVREKAKAFVEKIRGATELEHHHHHH

SEQ ID NO: 149 - protein, 723 aa, Artificial Sequence
  Synthetic Peptide - hMPV-compA fusion construct
MSWKVMIIISLLITPQHGLKESYLEESCSTITEGYLSVLRTGWYTNVFTLEVGDVENLTCTDGPSLIKTELDLTKSALRELKTVSADQLAREEQIENPRKARFVLGAIALGVCTAAAVTCGIAIAKTIRLESEVNAIKGALKTTNEAVSTLGNGVRVLAFAVRELKEFVSKNLTSALNKNKCDIADLKMAVSFSQFNRRFLNVVRQFSDNAGITPAISLDLMTDAELARAVSYMPTSAGQIKLMLENRAMVRRKGFGILIGVYGSSVIYMVQLPIFGVIDTPCWIIKAAPSCSEKDGNYACLLREDQGWYCKNAGSTVYYPNDKDCETRGDHVFCDTACGINVAEQSRECNINISTTNYPCKVSTGRHPISMVALSPLGALVACYKGVSCSIGSNRVGIIKQLPKGCSYITNQDADTVTIDNTVYCLSKVEGEQHVIKGRPVSSSFDPIKFPEDQFNVALDQVFESIENSQALVDQSNKILNSAESAIGSGGSGSGSGGSEKAAKAEEAARKMEELFKKHKIVAVLRANSVEEAIEKAVAVFAGGVHLIEITFTVPDADTVIKALSVLKEKGAIIGAGTVTSVEQARKAVESGAEFIVSPHLDEEISQFAKEKGVFYMPGVMTPTELVKAMKLGHTILKLFPGEVVGPQFVKAMKGPFPNVKFVPTGGVNLDNVAEWFKAGVLAVGVGSALVKGTPDEVREKAKAFVEKIRGATELEHHHHHH

SEQ ID NO: 150 - protein, 707 aa, Artificial Sequence
  Synthetic Peptide - hMPV-compA fusion construct
MSWKVMIIISLLITPQHGLKESYLEESCSTITEGYLSVLRTGWYTNVFTLEVGDVENLTCTDGPSLIKTELDLTKSALRELKTCSADQLAREEQIENPRRRRFVLGAIALGVATAAAVTAGIAIAKTIRLESEVNAIKGCLKTTNECVSTLGNGVRVLATAVRELKEFVSKNLTSAINKNKCDIADLKMAVSFSQFNRRFLNVVRQFSDNAGITPAISLDLMTDAELARAVSYMPTSAGQIKLMLENRCMVRRKGFGILIGVYGSSVIYMVQLPIFGVIDTPCWIIKAAPSCSEKDGNYACLLREDQGWYCKNAGSTVYYPNDKDCETRGDHVFCDTAAGINVAEQSRECNINISTTNYPCKVSTGRHPISMVALSPLGALVACYKGVSCSIGSNRVGIIKQLPKGCSYITNQDADTVTIDNTVYQLSKVEGEQHVIKGRPVSSSFDPIKFPEDQFNVALDQVFESIENSQAGSGGSGSGSGGSEKAAKAEEAARKMEELFKKHKIVAVLRANSVEEAIEKAVAVFAGGVHLIEITFTVPDADTVIKALSVLKEKGAIIGAGTVTSVEQARKAVESGAEFIVSPHLDEEISQFAKEKGVFYMPGVMTPTELVKAMKLGHTILKLFPGEVVGPQFVKAMKGPFPNVKFVPTGGVNLDNVAEWFKAGVLAVGVGSALVKGTPDEVREKAKAFVEKIRGATELEHHHHHH

SEQ ID NO: 151 - protein, 707 aa, Artificial Sequence
  Synthetic Peptide - hMPV-compA fusion construct
MSWKVMIIISLLITPQHGLKESYLEESCSTITEGYLSVLRTGWYTNVFTLEVGDVENLTCTDCPSLIKTELDLTKSALRELKTVSADQLAREEQIENPRRRRFVLGAIALGVATAAAVTAGIAIAKTIRLESEVNAIKGCLKTTNECVSTLGNGVRVLATAVRELKEFVSKNLTSAINKNKCDIADLCMAVSFSQFNRRFLNVVRQFSDNAGITPAISLDLMTDAELARAVSYMPTSAGQIKLMLENRAMVRRKGFGILIGVYGSSVIYMVQLPIFGVIDTPCWIIKAAPSCSEKDGNYACLLREDQGWYCKNAGSTVYYPNDKDCETRGDHVFCDTAAGINVAEQSRECNINISTTNYPCKVSTGRHPISMVALSPLGALVACYKGVSCSIGSNRVGIIKQLPKGCSYITNQDADTVTIDNTVYQLSKVEGEQHVIKGRPVSSSFDPICFPEDQFNVALDQVFESIENCQAGSGGSGSGSGGSEKAAKAEEAARKMEELFKKHKIVAVLRANSVEEAIEKAVAVFAGGVHLIEITFTVPDADTVIKALSVLKEKGAIIGAGTVTSVEQARKAVESGAEFIVSPHLDEEISQFAKEKGVFYMPGVMTPTELVKAMKLGHTILKLFPGEVVGPQFVKAMKGPFPNVKFVPTGGVNLDNVAEWFKAGVLAVGVGSALVKGTPDEVREKAKAFVEKIRGATELEHHHHHH

SEQ ID NO: 152 - protein, 706 aa, Artificial Sequence
  Synthetic Peptide - hMPV-compA fusion construct
MSWKVVIIFSLLITPQHGLKESYLEESCSTITEGYLSVLRTGWYTNVFTLEVGDVENLTCSDCPSLIKTELDLTKSALRELKTVSADQLAREEQIENPRRRRFVLAIALGVATAAAVTAGVAIAKTIRLESEVTAIKNCLKTTNECVSTLGNGVRVLATAVRELKDFVSKNLTSAINKNKCDIDDLCMAVSFSQFNRRFLNVVRQFSDNAGITPAISLDLMTDAELARAVSNMPTSAGQIKLMLENRAMVRRKGFGILIGVYGSSVIYMVQLPIFGVIDTPCWIIKAAPSCSGKKGNYACLLREDQGWYCQNAGSTVYYPNEKDCETRGDHVFCDTAAGINVAEQSKECNINISTTNYPCKVSTGRHPISMVALSPLGALVACYKGVSCSIGSNRVGIIKQLNKGCSYITNQDADTVTIDNTVYQLSKVEGEQHVIKGRPVSSSFDPIKFPEDQFNVALDQVFENIENSQAGSGGSGSGSGGSEKAAKAEEAARKMEELFKKHKIVAVLRANSVEEAIEKAVAVFAGGVHLIEITFTVPDADTVIKALSVLKEKGAIIGAGTVTSVEQARKAVESGAEFIVSPHLDEEISQFAKEKGVFYMPGVMTPTELVKAMKLGHTILKLFPGEVVGPQFVKAMKGPFPNVKFVPTGGVNLDNVAEWFKAGVLAVGVGSALVKGTPDEVREKAKAFVEKIRGATELEHHHHHH

SEQ ID NO: 153 - protein, 707 aa, Artificial Sequence
  Synthetic Peptide - hMPV-compA fusion construct
MSWKVMIIISLLITPQHGLKESYLEESCSTITEGYLSVLRTGWYTNVFTLEVGDVENLTCTDGPSLIKTELDLTKSALRELKTVSADQLAREEQIENPRRRRFVLGAIALGVCTAAAVTCGIAIAKTIRLESEVNAIKGALKTTNEAVSTLGNGVRVLAFAVRELKEFVSKNLTSALNKNKCDIADLKMAVSFSQFNRRFLNVVRQFSDNAGITPAISLDLMTDAELARAVSYMPTSAGQIKLMLENRAMVRRKGFGILIGVYGSSVIYMVQLPIFGVIDTPCWIIKAAPSCSEKDGNYACLLREDQGWYCKNAGSTVYYPNDKDCETRGDHVFCDTACGINVAEQSRECNINISTTNYPCKVSTGRHPISMVALSPLGALVACYKGVSCSIGSNRVGIIKQLPKGCSYITNQDADTVTIDNTVYCLSKVEGEQHVIKGRPVSSSFDPIKFPEDQFNVALDQVFESIENSQAGSGGSGSGSGGSEKAAKAEEAARKMEELFKKHKIVAVLRANSVEEAIEKAVAVFAGGVHLIEITFTVPDADTVIKALSVLKEKGAIIGAGTVTSVEQARKAVESGAEFIVSPHLDEEISQFAKEKGVFYMPGVMTPTELVKAMKLGHTILKLFPGEVVGPQFVKAMKGPFPNVKFVPTGGVNLDNVAEWFKAGVLAVGVGSALVKGTPDEVREKAKAFVEKIRGATELEHHHHHH

SEQ ID NO: 154 - protein, 707 aa, Artificial Sequence
  Synthetic Peptide - hMPV-compA fusion construct
MSWKVVIIFSLLITPQHGLKESYLEESCSTITEGYLSVLRTGWYTNVFTLEVGDVENLTCADGPSLIKTELDLTKSALRELRTVSADQLAREEQIENPRRRRFVLGAIALGVCTAAAVTAGVAIAKTIRLESEVTAIKNALKKTNEAVSTLGNGVRVLATAVRELKDFVSKNLTRAINKNKCDIPDLKMAVSFSQFNRRFLNVVRQFSDNAGITPAISLDLMTDAELARAVSNMPTSAGQIKLMLENRAMVRRKGFGFLIGVYGSSVIYMVQLPIFGVIDTPCWIVKAAPSCSGKKGNYACLLREDQGWYCQNAGSTVYYPNEKDCETRGDHVFCDTACGINVAEQSKECNINISTTNYPCKVSTGRHPISMVALSPLGALVACYKGVSCSIGSNRVGIIKQLNKGCSYITNQDADTVTIDNTVYQLSKVEGEQHVIKGRPVSSSFDPVKFPEDQFNVALDQVFESIENSQAGSGGSGSGSGGSEKAAKAEEAARKMEELFKKHKIVAVLRANSVEEAIEKAVAVFAGGVHLIEITFTVPDADTVIKALSVLKEKGAIIGAGTVTSVEQARKAVESGAEFIVSPHLDEEISQFAKEKGVFYMPGVMTPTELVKAMKLGHTILKLFPGEVVGPQFVKAMKGPFPNVKFVPTGGVNLDNVAEWFKAGVLAVGVGSALVKGTPDEVREKAKAFVEKIRGATELEHHHHHH

SEQ ID NO: 155 - protein, 707 aa, Artificial Sequence
  Synthetic Peptide - hMPV-compA fusion construct
MSWKVVIIFSLLITPQHGLKESYLEESCSTITEGYLSVLRTGWYTNVFTLEVGDVENLTCADGPSLIKTELDLTKSALRELRTVSADQLAREEQIENPRRRRFVLGAIALGVATAAAVTAGVAIAKTIRLESEVTAIKNALKKTNEAVSTLGNGVRVLAFAVRELKDFVSKNLTRALNKNKCDIPDLKMAVSFSQFNRRFLNVVRQFSDNAGITPAISLDLMTDAELARAVSNMPTSAGQIKLMLENRAMVRRKGFGFLIGVYGSSVIYMVQLPIFGVIDTPCWIVKAAPSCSGKKGNYACLLREDQGWYCQNAGSTVYYPNEKDCETRGDHVFCDTAAGINVAEQSKECNINISTTNYPCKVSTGRHPISMVALSPLGALVACYKGVSCSIGSNRVGIIKQLNKGCSYITNQDADTVTIDNTVYQLSKVEGEQHVIKGRPVSSSFDPVKFPEDQFNVALDQVFESIENSQAGSGGSGSGSGGSEKAAKAEEAARKMEELFKKHKIVAVLRANSVEEAIEKAVAVFAGGVHLIEITFTVPDADTVIKALSVLKEKGAIIGAGTVTSVEQARKAVESGAEFIVSPHLDEEISQFAKEKGVFYMPGVMTPTELVKAMKLGHTILKLFPGEVVGPQFVKAMKGPFPNVKFVPTGGVNLDNVAEWFKAGVLAVGVGSALVKGTPDEVREKAKAFVEKIRGATELEHHHHHH

SEQ ID NO: 156 - protein, 707 aa, Artificial Sequence
  Synthetic Peptide - hMPV-compA fusion construct
MSWKVVIIFSLLITPQHGLKESYLEESCSTITEGYLSVLRTGWYTNVFTLEVGDVENLTCADGPSLIKTELDLTKSALRELRTVSADQLAREEQIENPRRRRFVLGAIALGVCTAAAVTAGVAIAKTIRLESEVTAIKNALKKTNEAVSTLGNGVRVLAFAVRELKDFVSKNLTRALNKNKCDIPDLKMAVSFSQFNRRFLNVVRQFSDNAGITPAISLDLMTDAELARAVSNMPTSAGQIKLMLENRAMVRRKGFGFLIGVYGSSVIYMVQLPIFGVIDTPCWIVKAAPSCSGKKGNYACLLREDQGWYCQNAGSTVYYPNEKDCETRGDHVFCDTACGINVAEQSKECNINISTTNYPCKVSTGRHPISMVALSPLGALVACYKGVSCSIGSNRVGIIKQLNKGCSYITNQDADTVTIDNTVYQLSKVEGEQHVIKGRPVSSSFDPVKFPEDQFNVALDQVFESIENSQAGSGGSGSGSGGSEKAAKAEEAARKMEELFKKHKIVAVLRANSVEEAIEKAVAVFAGGVHLIEITFTVPDADTVIKALSVLKEKGAIIGAGTVTSVEQARKAVESGAEFIVSPHLDEEISQFAKEKGVFYMPGVMTPTELVKAMKLGHTILKLFPGEVVGPQFVKAMKGPFPNVKFVPTGGVNLDNVAEWFKAGVLAVGVGSALVKGTPDEVREKAKAFVEKIRGATELEHHHHHH

SEQ ID NO: 157 - protein, 707 aa, Artificial Sequence
  Synthetic Peptide - hMPV-compA fusion construct
MSWKVMIIISLLITPQHGLKESYLEESCSTITEGYLSVLRTGWYTNVFTLEVGDVENLTCTDCPSLIKTELDLTKSALRELKTVSADQLAREEQIEGGGGGGFVLGAIALGVATAAAVTAGIAIAKTIRLESEVNAIKGALKTTNEAVSTLGNGVRVLATAVRELKEFVSKNLTSAINKNKCDIADLCMAVSFSQFNRRFLNVVRQFSDNAGITPAISLDLMTDAELARAVSYMPTSAGQIKLMLENRAMVRRKGFGILIGVYGSSVIYMVQLPIFGVIDTPCWIIKAAPSCSEKDGNYACLLREDQGWYCKNAGSTVYYPNDKDCETRGDHVFCDTAAGINVAEQSRECNINISTTNYPCKVSTGRHPISMVALSPLGALVACYKGVSCSIGSNRVGIIKQLPKGCSYITNQDADTVTIDNTVYQLSKVEGEQHVIKGRPVSSSFDPIKFPEDQFNVALDQVFESIENSQAGSGGSGSGSGGSEKAAKAEEAARKMEELFKKHKIVAVLRANSVEEAIEKAVAVFAGGVHLIEITFTVPDADTVIKALSVLKEKGAIIGAGTVTSVEQARKAVESGAEFIVSPHLDEEISQFAKEKGVFYMPGVMTPTELVKAMKLGHTILKLFPGEVVGPQFVKAMKGPFPNVKFVPTGGVNLDNVAEWFKAGVLAVGVGSALVKGTPDEVREKAKAFVEKIRGATELEHHHHHH

SEQ ID NO: 158 - protein, 707 aa, Artificial Sequence
  Synthetic Peptide - hMPV-compA fusion construct
MSWKVMIIISLLITPQHGLKESYLEESCSTITEGYLSVLRTGWYTNVFTLEVGDVENLTCTDCPSLIKTELDLTKSALRELKTVSADQLAREEQIEGGGGGGFVLGAIALGVATAAAVTAGIAIAKTIRLESEVNAIKGALKTTNEAVSTLGNGVRVLATAVRELKEFVSKNLTSAINKNKCDIADLCMAVSFSQFNRRFLNVVRQFSDNAGITPAISLDLMTDAELARAVSYMPTSAGQIKLMLENRAMVRRKGFGILIGVYGSSVIYMVQLPIFGVIDTPCWIIKAAPSCSEKDGNYACLLREDQGWYCKNAGSTVYYPNDKDCETRGDHVFCDTAAGINVAEQSRECNINISTTNYPCKVSTGRHPISMVALSPLGALVACYKGVSCSIGSNRVGIIKQLPKGCSYITNQDADTVTIDNTVYQLSKVEGEQHVIKGRPVSSSFDPIAFPEDQFNVALDQVFESIENAQAGSGGSGSGSGGSEKAAKAEEAARKMEELFKKHKIVAVLRANSVEEAIEKAVAVFAGGVHLIEITFTVPDADTVIKALSVLKEKGAIIGAGTVTSVEQARKAVESGAEFIVSPHLDEEISQFAKEKGVFYMPGVMTPTELVKAMKLGHTILKLFPGEVVGPQFVKAMKGPFPNVKFVPTGGVNLDNVAEWFKAGVLAVGVGSALVKGTPDEVREKAKAFVEKIRGATELEHHHHHH

SEQ ID NO: 159 - protein, 707 aa, Artificial Sequence
  Synthetic Peptide - hMPV-compA fusion construct
MSWKVVIIFSLLITPQHGLKESYLEESCSTITEGYLSVLRTGWYTNVFTLEVGDVENLTCSDCPSLIKTELDLTKSALRELKTVSADQLAREEQIEGGGGGGFVLGAIALGVATAAAVTAGVAIAKTIRLESEVTAIKNCLKTTNECVSTLGNGVRVLATAVRELKDFVSKNLTSAINKNKCDIDDLCMAVSFSQFNRRFLNVVRQFSDNAGITPAISLDLMTDAELARAVSNMPTSAGQIKLMLENRAMVRRKGFGILIGVYGSSVIYMVQLPIFGVIDTPCWIIKAAPSCSEKKGNYACLLREDQGWYCQNAGSTVYYPNEKDCETRGDHVFCDTAAGINVAEQSKECNINISTTNYPCKVSTGRHPISMVALSPLGALVACYKGVSCSIGSNRVGIIKQLNKGCSYITNQDADTVTIDNTVYQLSKVEGEQHVIKGRPVSSSFDPIKFPEDQFNVALDQVFENIENSQAGSGGSGSGSGGSEKAAKAEEAARKMEELFKKHKIVAVLRANSVEEAIEKAVAVFAGGVHLIEITFTVPDADTVIKALSVLKEKGAIIGAGTVTSVEQARKAVESGAEFIVSPHLDEEISQFAKEKGVFYMPGVMTPTELVKAMKLGHTILKLFPGEVVGPQFVKAMKGPFPNVKFVPTGGVNLDNVAEWFKAGVLAVGVGSALVKGTPDEVREKAKAFVEKIRGATELEHHHHHH

SEQ ID NO: 160 - protein, 707 aa, Artificial Sequence
  Synthetic Peptide - hMPV-compA fusion construct
MSWKVVIIFSLLITPQHGLKESYLEESCSTITEGYLSVLRTGWYTNVFTLEVGDVENLTCADCPSLIKTELDLTKSALRELRTVSADQLAREEQIEGGGGGGFVLGAIALGVATAAAVTAGVAIAKTIRLESEVTAIKNCLKKTNECVSTLGNGVRVLATAVRELKDFVSKNLTRAINKNKCDIADLCMAVSFSQFNRRFLNVVRQFSDNAGITPAISLDLMTDAELARAVSNMPTSAGQIKLMLENRAMVRRKGFGFLIGVYGSSVIYMVQLPIFGVIDTPCWIVKAAPSCSEKKGNYACLLREDQGWYCQNAGSTVYYPNEKDCETRGDHVFCDTAAGINVAEQSKECNINISTTNYPCKVSTGRHPISMVALSPLGALVACYKGVSCSIGSNRVGIIKQLNKGCSYITNQDADTVTIDNTVYQLSKVEGEQHVIKGRPVSSSFDPVCFPEDQFNVALDQVFESIENCQAGSGGSGSGSGGSEKAAKAEEAARKMEELFKKHKIVAVLRANSVEEAIEKAVAVFAGGVHLIEITFTVPDADTVIKALSVLKEKGAIIGAGTVTSVEQARKAVESGAEFIVSPHLDEEISQFAKEKGVFYMPGVMTPTELVKAMKLGHTILKLFPGEVVGPQFVKAMKGPFPNVKFVPTGGVNLDNVAEWFKAGVLAVGVGSALVKGTPDEVREKAKAFVEKIRGATELEHHHHHH

SEQ ID NO: 161 - protein, 707 aa, Artificial Sequence
  Synthetic Peptide - hMPV-compA fusion construct
MSWKVVIIFSLLITPQHGLKESYLEESCSTITEGYLSVLRTGWYTNVFTLEVGDVENLTCADCPSLIKTELDLTKSALRELRTVSADQLAREEQIEGGGGGGFVLGAIALGVATAAAVTAGVAIAKTIRLESEVTAIKNALKKTNEAVSTLGNGVRVLATAVRELKDFVSKNLTRAINKNKCDIADLCMAVSFSQFNRRFLNVVRQFSDNAGITPAISLDLMTDAELARAVSNMPTSAGQIKLMLENRAMVRRKGFGFLIGVYGSSVIYMVQLPIFGVIDTPCWIVKAAPSCSEKKGNYACLLREDQGWYCQNAGSTVYYPNEKDCETRGDHVFCDTAAGINVAEQSKECNINISTTNYPCKVSTGRHPISMVALSPLGALVACYKGVSCSIGSNRVGIIKQLNKGCSYITNQDADTVTIDNTVYQLSKVEGEQHVIKGRPVSSSFDPVKFPEDQFNVALDQVFESIENSQAGSGGSGSGSGGSEKAAKAEEAARKMEELFKKHKIVAVLRANSVEEAIEKAVAVFAGGVHLIEITFTVPDADTVIKALSVLKEKGAIIGAGTVTSVEQARKAVESGAEFIVSPHLDEEISQFAKEKGVFYMPGVMTPTELVKAMKLGHTILKLFPGEVVGPQFVKAMKGPFPNVKFVPTGGVNLDNVAEWFKAGVLAVGVGSALVKGTPDEVREKAKAFVEKIRGATELEHHHHHH

SEQ ID NO: 162 - protein, 707 aa, Artificial Sequence
  Synthetic Peptide - hMPV-compA fusion construct
MSWKVVIIFSLLITPQHGLKESYLEESCSTITEGYLSVLRTGWYTNVFTLEVGDVENLTCADGPSLIKTELDLTKSALRELRTVSADQLAREEQIENPRRRRFVLGAIALGVATAAAVTAGVAIAKCIRLESEVTAIKNALKKTNEAVSTLGCGVRVLATAVRELKDFVSKNLTRAINKNKCDIPDLKMAVSFSQFNRRFLNVVRQFSDNAGITPAISKDLMTDAELARAISNMPTSAGQIKLMLENRAMVRRKGFGILIGVYGSSVIYMVQLPIFGVIDTPCWIVKAAPSCSEKKGNYACLLREDQGWYCQNAGSTVYYPNEKDCETRGDHVFCDTAAGINVAEQSKECNINISTTNYPCKVSCGRNPISMVALSPLGALVACYKGVSCSIGSNRVGIIKQLNKGCSYITNQDADTVTIDNTVYQLSKVEGEQHVIKGRPVSSSFDPVKFPEDQFNVALDQCFESIENSQAGSGGSGSGSGGSEKAAKAEEAARKMEELFKKHKIVAVLRANSVEEAIEKAVAVFAGGVHLIEITFTVPDADTVIKALSVLKEKGAIIGAGTVTSVEQARKAVESGAEFIVSPHLDEEISQFAKEKGVFYMPGVMTPTELVKAMKLGHTILKLFPGEVVGPQFVKAMKGPFPNVKFVPTGGVNLDNVAEWFKAGVLAVGVGSALVKGTPDEVREKAKAFVEKIRGATELEHHHHHH

SEQ ID NO: 163 - protein, 725 aa, Artificial Sequence
  Synthetic Peptide - hMPV-compA fusion construct
MSWKVVIIFSLLITPQHGLKESYLEESCSTITEGYLSVLRTGWYTNVFTLEVGDVENLTCADGPSLIKTELDLTKSALRELRTVSADQLAREEQIENPRRRRFVLGAIALGVATAAAVTAGVAIAKCIRLESEVTAIKNALKKTNEAVSTLGCGVRVLATAVRELKDFVSKNLTRAINKNKCDIPDLKMAVSFSQFNRRFLNVVRQFSDNAGITPAISKDLMTDAELARAISNMPTSAGQIKLMLENRAMVRRKGFGILIGVYGSSVIYMVQLPIFGVIDTPCWIVKAAPSCSEKKGNYACLLREDQGWYCQNAGSTVYYPNEKDCETRGDHVFCDTAAGINVAEQSKECNINISTTNYPCKVSCGRNPISMVALSPLGALVACYKGVSCSIGSNRVGIIKQLNKGCSYITNQDADTVTIDNTVYQLSKVEGEQHVIKGRPVSSSFDPVKFPEDQFNVALDQCFESIENSQALVDQSNRILSSAEKGNTGGSGGSGSGSGGSEKAAKAEEAARKMEELFKKHKIVAVLRANSVEEAIEKAVAVFAGGVHLIEITFTVPDADTVIKALSVLKEKGAIIGAGTVTSVEQARKAVESGAEFIVSPHLDEEISQFAKEKGVFYMPGVMTPTELVKAMKLGHTILKLFPGEVVGPQFVKAMKGPFPNVKFVPTGGVNLDNVAEWFKAGVLAVGVGSALVKGTPDEVREKAKAFVEKIRGATELEHHHHHH

SEQ ID NO: 164 - protein, 707 aa, Artificial Sequence
  Synthetic Peptide - hMPV-compA fusion construct
MSWKVMIIISLLITPQHGLKESYLEESCSTITEGYLSVLRTGWYTNVFTLEVGDVENLTCTDCPSLIKTELDLTKSALRELKTVSADQLAREEQIEGGGGGGFVLGAIALGVATAAAVTAGIAIAKTIRLESEVNAIKGCLKTTNECVSTLGNGVRVLATAVRELKEFVSKNLTSAINKNKCDIADLCMAVSFSQFNRRFLNVVRQFSDNAGITPAISLDLMTDAELARAVSYMPTSAGQIKLMLENRAMVRRKGFGILIGVYGSSVIYMVQLPIFGVIDTPCWIIKAAPSCSEKDGNYACLLREDQGWYCKNAGSTVYYPNDKDCETRGDHVFCDTAAGINVAEQSRECNINISTTNYPCKVSTGRHPISMVALSPLGALVACYKGVSCSIGSNRVGIIKQLPKGCSYITNQDADTVTIDNTVYQLSKVEGEQHVIKGRPVSSSFDPICFPEDQFNVALDQVFESIENCQAGSGGSGSGSGGSEKAAKAEEAARKMEELFKKHKIVAVLRANSVEEAIEKAVAVFAGGVHLIEITFTVPDADTVIKALSVLKEKGAIIGAGTVTSVEQCRKAVESGAEFIVSPHLDEEISQFCKEKGVFYMPGVMTPTELVKAMKLGHTILKLFPGEVVGPQFVKAMKGPFPNVKFVPTGGVNLDNVCEWFKAGVLAVGVGSALVKGTPDEVREKAKAFVEKIRGCTELEHHHHHH

SEQ ID NO: 165 - protein, 707 aa, Artificial Sequence
  Synthetic Peptide - hMPV-compA fusion construct
MSWKVVIIFSLLITPQHGLKESYLEESCSTITEGYLSVLRTGWYTNVFTLEVGDVENLTCADGPSLIKTELDLTKSALRELRTVSADQLAREEQIENPRRRRFVLGAIALGVATAAAVTAGVAIAKCIRLESEVTAIKNALKKTNEAVSTLGCGVRVLATAVRELKDFVSKNLTRAINKNKCDIPDLKMAVSFSQFNRRFLNVVRQFSDNAGITPAISKDLMTDAELARAISNMPTSAGQIKLMLENRAMVRRKGFGILIGVYGSSVIYMVQLPIFGVIDTPCWIVKAAPSCSEKKGNYACLLREDQGWYCQNAGSTVYYPNEKDCETRGDHVFCDTAAGINVAEQSKECNINISTTNYPCKVSCGRNPISMVALSPLGALVACYKGVSCSIGSNRVGIIKQLNKGCSYITNQDADTVTIDNTVYQLSKVEGEQHVIKGRPVSSSFDPVKFPEDQFNVALDQCFESIENSQAGSGGSGSGSGGSEKAAKAEEAARKMEELFKKHKIVAVLRANSVEEAIEKAVAVFAGGVHLIEITFTVPDADTVIKALSVLKEKGAIIGAGTVTSVEQCRKAVESGAEFIVSPHLDEEISQFCKEKGVFYMPGVMTPTELVKAMKLGHTILKLFPGEVVGPQFVKAMKGPFPNVKFVPTGGVNLDNVCEWFKAGVLAVGVGSALVKGTPDEVREKAKAFVEKIRGCTELEHHHHHH

SEQ ID NO: 166 - protein, 725 aa, Artificial Sequence
  Synthetic Peptide - hMPV-compA fusion construct
MSWKVVIIFSLLITPQHGLKESYLEESCSTITEGYLSVLRTGWYTNVFTLEVGDVENLTCADGPSLIKTELDLTKSALRELRTVSADQLAREEQIENPRRRRFVLGAIALGVATAAAVTAGVAIAKCIRLESEVTAIKNALKKTNEAVSTLGCGVRVLATAVRELKDFVSKNLTRAINKNKCDIPDLKMAVSFSQFNRRFLNVVRQFSDNAGITPAISKDLMTDAELARAISNMPTSAGQIKLMLENRAMVRRKGFGILIGVYGSSVIYMVQLPIFGVIDTPCWIVKAAPSCSEKKGNYACLLREDQGWYCQNAGSTVYYPNEKDCETRGDHVFCDTAAGINVAEQSKECNINISTTNYPCKVSCGRNPISMVALSPLGALVACYKGVSCSIGSNRVGIIKQLNKGCSYITNQDADTVTIDNTVYQLSKVEGEQHVIKGRPVSSSFDPVKFPEDQFNVALDQCFESIENSQALVDQSNRILSSAEKGNTGGSGGSGSGSGGSEKAAKAEEAARKMEELFKKHKIVAVLRANSVEEAIEKAVAVFAGGVHLIEITFTVPDADTVIKALSVLKEKGAIIGAGTVTSVEQCRKAVESGAEFIVSPHLDEEISQFCKEKGVFYMPGVMTPTELVKAMKLGHTILKLFPGEVVGPQFVKAMKGPFPNVKFVPTGGVNLDNVCEWFKAGVLAVGVGSALVKGTPDEVREKAKAFVEKIRGCTELEHHHHHH

SEQ ID NO: 167 - protein, 540 aa, Artificial Sequence
  Synthetic Peptide - RSV-compA fusion construct
MELLILKANAITTILTAVTFCFASGQNITEEFYQSTCSAVSKGYLSALRTGWYTSVITIELSNIKENKCNGTDAKVKLIKQELDKYKNAVTELQLLMQSTPATNNRARRELPRFMNYTLNNAKKTNVTLSKKRKRRFLGFLLGVGSAIASGVAVCKVLHLEGEVNKIKSALLSTNKAVVSLSNGVSVLTFKVLDLKNYIDKQLLPILNKQSCSISNIETVIEFQQKNNRLLEITREFSVNAGVTTPVSTYMLTNSELLSLINDMPITNDQKKLMSNNVQIVRQQSYSIMCIIKEEVLAYVVQLPLYGVIDTPCWKLHTSPLCTTNTKEGSNICLTRTDRGWYCDNAGSVSFFPQAETCKVQSNRVFCDTMNSLTLPSEVNLCNVDIFNPKYDCKIMTSKTDVSSSVITSLGAIVSCYGKTKCTASNKNRGIIKTFSNGCDYVSNKGVDTVSVGNTLYYVNKQEGKSLYVKGEPIINFYDPLVFPSDEFDASISQVNEKINQSLAFIRKSDELLGYIPEAPRDGQAYVRKDGEWVLLSTFL

SEQ ID NO: 168 - protein, 646 aa, Artificial Sequence
  Synthetic Peptide - RSV-compA fusion construct
MELLILKANVIATILTAVTFCFASSQNITEEFYQSTCSAVSKGYLSALRTGWYTSVITIELSNIKENKCNGTDAKVKLIKQELDKYKNAVTELQLLMQSTPATNNRARRELPRFMNYTLNNAKKTNVTLSKKRKRRFLGFLLGVGSAIASGVAVCKVLHLEGEVNKIKSALLSTNKAVVSLSNGVSVLTFKVLDLKNYIDKQLLPILNKQSCSISNIETVIEFQQKNNRLLEITREFSVNAGVTTPVSTYMLTNSELLSLINDMPITNDQKKLMSNNVQIVRQQSYSIMCIIKEEVLAYVVQLPLYGVIDTPCWKLHTSPLCTTNTKEGSNICLTRTDRGWYCDNAGSVSFFPQAETCKVQSNRVFCDTMNSLTLPSEVNLCNVDIFNPKYDCKIMTSKTDVSSSVITSLGAIVSCYGKTKCTASNKNRGIIKTFSNGCDYVSNKGVDTVSVGNTLYYVNKQEGKSLYVKGEPIINFYDPLVFPSDEFDASISQVNEKINQSLAFIRKSDELLGYIPEAPRDGQAYVRKDGEWVLLSTFLGGSMEEVVLITVPSALVAVKIAHALVEERLAACVNIVPGLTSIYREEGSVVSDHELLLLVKTTTDAFPKLKERVKELHPYEVPEIVALPIAEGNREYLDWLRENTG

SEQ ID NO: 169 - protein, 619 aa, Artificial Sequence
  Synthetic Peptide - RSV-compA fusion construct
MELLILKANVIATILTAVTFCFASSQNITEEFYQSTCSAVSKGYLSALRTGWYTSVITIELSNIKENKCNGTDAKVKLIKQELDKYKNAVTELQLLMQSTPATNNRARRELPRFMNYTLNNAKKTNVTLSKKRKRRFLGFLLGVGSAIASGVAVCKVLHLEGEVNKIKSALLSTNKAVVSLSNGVSVLTFKVLDLKNYIDKQLLPILNKQSCSISNIETVIEFQQKNNRLLEITREFSVNAGVTTPVSTYMLTNSELLSLINDMPITNDQKKLMSNNVQIVRQQSYSIMCIIKEEVLAYVVQLPLYGVIDTPCWKLHTSPLCTTNTKEGSNICLTRTDRGWYCDNAGSVSFFPQAETCKVQSNRVFCDTMNSLTLPSEVNLCNVDIFNPKYDCKIMTSKTDVSSSVITSLGAIVSCYGKTKCTASNKNRGIIKTFSNGCDYVSNKGVDTVSVGNTLYYVNKQEGKSLYVKGEPIINFYDPLVFPSDEFDASISQVNEKINQSLAFIRKSDELLGGSMEEVVLITVPSALVAVKIAHALVEERLAACVNIVPGLTSIYREEGSVVSDHELLLLVKTTTDAFPKLKERVKELHPYEVPEIVALPIAEGNREYLDWLRENTG

SEQ ID NO: 170 - protein, 665 aa, Artificial Sequence
  Synthetic Peptide - RSV-compA fusion construct
MELLILKANVIATILTAVTFCFASSQNITEEFYQSTCSAVSKGYLSALRTGWYTSVITIELSNIKENKCNGTDAKVKLIKQELDKYKNAVTELQLLMQSTPATNNRARRELPRFMNYTLNNAKKTNVTLSKKRKRRFLGFLLGVGSAIASGVAVCKVLHLEGEVNKIKSALLSTNKAVVSLSNGVSVLTFKVLDLKNYIDKQLLPILNKQSCSISNIETVIEFQQKNNRLLEITREFSVNAGVTTPVSTYMLTNSELLSLINDMPITNDQKKLMSNNVQIVRQQSYSIMCIIKEEVLAYVVQLPLYGVIDTPCWKLHTSPLCTTNTKEGSNICLTRTDRGWYCDNAGSVSFFPQAETCKVQSNRVFCDTMNSLTLPSEVNLCNVDIFNPKYDCKIMTSKTDVSSSVITSLGAIVSCYGKTKCTASNKNRGIIKTFSNGCDYVSNKGVDTVSVGNTLYYVNKQEGKSLYVKGEPIINFYDPLVFPSDEFDASISQVNEKINQSLAFIRKSDELLGYIPEAPRDGQAYVRKDGEWVLLSTFLGGSMVRGIRGAITVNSDTPTSIIIATILLLEKMLEANGIQSYEELAAVIFTVTEDLTSAFPAEAARQIGMHRVPLLSAREVPVPGSLPRVIRVLALWNTDTPQDRVRHVYLSEAVRLRPDLESAQ

SEQ ID NO: 171 - protein, 638 aa, Artificial Sequence
  Synthetic Peptide - RSV-compA fusion construct
MELLILKANVIATILTAVTFCFASSQNITEEFYQSTCSAVSKGYLSALRTGWYTSVITIELSNIKENKCNGTDAKVKLIKQELDKYKNAVTELQLLMQSTPATNNRARRELPRFMNYTLNNAKKTNVTLSKKRKRRFLGFLLGVGSAIASGVAVCKVLHLEGEVNKIKSALLSTNKAVVSLSNGVSVLTFKVLDLKNYIDKQLLPILNKQSCSISNIETVIEFQQKNNRLLEITREFSVNAGVTTPVSTYMLTNSELLSLINDMPITNDQKKLMSNNVQIVRQQSYSIMCIIKEEVLAYVVQLPLYGVIDTPCWKLHTSPLCTTNTKEGSNICLTRTDRGWYCDNAGSVSFFPQAETCKVQSNRVFCDTMNSLTLPSEVNLCNVDIFNPKYDCKIMTSKTDVSSSVITSLGAIVSCYGKTKCTASNKNRGIIKTFSNGCDYVSNKGVDTVSVGNTLYYVNKQEGKSLYVKGEPIINFYDPLVFPSDEFDASISQVNEKINQSLAFIRKSDELLGGSMVRGIRGAITVNSDTPTSIIIATILLLEKMLEANGIQSYEELAAVIFTVTEDLTSAFPAEAARQIGMHRVPLLSAREVPVPGSLPRVIRVLALWNTDTPQDRVRHVYLSEAVRLRPDLESAQ

SEQ ID NO: 172 - protein, 769 aa, Artificial Sequence
  Synthetic Peptide - RSV-compA fusion construct
MELLILKANAITTILTAVTFCFASGQNITEEFYQSTCSAVSKGYLSALRTGWYTSVITIELSNIKENKCNGTDAKVKLIKQELDKYKNAVTELQLLMQSTPATNNRARRELPRFMNYTLNNAKKTNVTLSKKRKRRFLGFLLGVGSAIASGVAVCKVLHLEGEVNKIKSALLSTNKAVVSLSNGVSVLTFKVLDLKNYIDKQLLPILNKQSCSISNIETVIEFQQKNNRLLEITREFSVNAGVTTPVSTYMLTNSELLSLINDMPITNDQKKLMSNNVQIVRQQSYSIMCIIKEEVLAYVVQLPLYGVIDTPCWKLHTSPLCTTNTKEGSNICLTRTDRGWYCDNAGSVSFFPQAETCKVQSNRVFCDTMNSLTLPSEVNLCNVDIFNPKYDCKIMTSKTDVSSSVITSLGAIVSCYGKTKCTASNKNRGIIKTFSNGCDYVSNKGVDTVSVGNTLYYVNKQEGKSLYVKGEPIINFYDPLVFPSDEFDASISQVNEKINQSLAFIRGYIPEAPRDGQAYVRKDGEWVLLSTFLGSGSHHHHHHHHGGSGGSGSEKAAKAEEAARKMEELFKKHKIVAVLRANSVEEAIEKAVAVFAGGVHLIEITFTVPDADTVIKALSVLKEKGAIIGAGTVTSVEQCRKAVESGAEFIVSPHLDEEISQFCKEKGVFYMPGVMTPTELVKAMKLGHTILKLFPGEVVGPQFVKAMKGPFPNVKFVPTGGVNLDNVCEWFKAGVLAVGVGSALVKGTPDEVREKAKAFVEKIRGCTE

SEQ ID NO: 173 - protein, 730 aa, Artificial Sequence
  Synthetic Peptide - RSV-compA fusion construct
MELLILKANVIATILTAVTFCFASSQNITEEFYQSTCSAVSKGYLSALRTGWYTSVITIELSNIKENKCNGTDAKVKLIKQELDKYKNAVTELQLLMQSTPATNNRARRELPRFMNYTLNNAKKTNVTLSKKRKRRFLGFLLGVGSAIASGVAVCKVLHLEGEVNKIKSALLSTNKAVVSLSNGVSVLTFKVLDLKNYIDKQLLPILNKQSCSISNIETVIEFQQKNNRLLEITREFSVNAGVTTPVSTYMLTNSELLSLINDMPITNDQKKLMSNNVQIVRQQSYSIMCIIKEEVLAYVVQLPLYGVIDTPCWKLHTSPLCTTNTKEGSNICLTRTDRGWYCDNAGSVSFFPQAETCKVQSNRVFCDTMNSLTLPSEVNLCNVDIFNPKYDCKIMTSKTDVSSSVITSLGAIVSCYGKTKCTASNKNRGIIKTFSNGCDYVSNKGVDTVSVGNTLYYVNKQEGKSLYVKGEPIINFYDPLVFPSDEFDASISQVNEKINQSLAFIRGGSGGSGSEKAAKAEEAARKMEELFKKHKIVAVLRANSVEEAIEKAVAVFAGGVHLIEITFTVPDADTVIKALSVLKEKGAIIGAGTVTSVEQCRKAVESGAEFIVSPHLDEEISQFCKEKGVFYMPGVMTPTELVKAMKLGHTILKLFPGEVVGPQFVKAMKGPFPNVKFVPTGGVNLDNVCEWFKAGVLAVGVGSALVKGTPDEVREKAKAFVEKIRGCTE

SEQ ID NO: 174 - protein, 676 aa, Artificial Sequence
  Synthetic Peptide - RSV-compA fusion construct
MELLILKANAITTILTAVTFCFASGQNITEEFYQSTCSAVSKGYLSALRTGWYTSVITIELSNIKENKCNGTDAKVKLIKQELDKYKNAVTELQLLMQSTPATNNRARRELPRFMNYTLNNAKKTNVTLSKKRKRRFLGFLLGVGSAIASGVAVCKVLHLEGEVNKIKSALLSTNKAVVSLSNGVSVLTFKVLDLKNYIDKQLLPILNKQSCSISNIETVIEFQQKNNRLLEITREFSVNAGVTTPVSTYMLTNSELLSLINDMPITNDQKKLMSNNVQIVRQQSYSIMCIIKEEVLAYVVQLPLYGVIDTPCWKLHTSPLCTTNTKEGSNICLTRTDRGWYCDNAGSVSFFPQAETCKVQSNRVFCDTMNSLTLPSEVNLCNVDIFNPKYDCKIMTSKTDVSSSVITSLGAIVSCYGKTKCTASNKNRGIIKTFSNGCDYVSNKGVDTVSVGNTLYYVNKQEGKSLYVKGEPIINFYDPLVFPSDEFDASISQVNEKINQSLAFIRKSDELLGGSGGSGSDDARIAAIGDVDELNSQIGVLLAEPLPDDVRAALSAIQHDLFDLGGELCIPGHAAITEDHLLRLALWLVHYNGQLPPLEEFILPGGARGAALAHVCRTVCRRAERSIKALGASEPLNIAPAAYVNLLSDLLFVLARVLNRAAGGADVLWDRTRAH

SEQ ID NO: 175 - protein, 730 aa, Artificial Sequence
  Synthetic Peptide - RSV-compA fusion construct
MELLILKANAITTILTAVTFCFASGQNITEEFYQSTCSAVSKGYLSALRTGWYTSVITIELSNIKENKCNGTDAKVKLIKQELDKYKNAVTELQLLMQSTPATNNRARRELPRFMNYTLNNAKKTNVTLSKKRKRRFLGFLLGVGSAIASGVAVCKVLHLEGEVNKIKSALLSTNKAVVSLSNGVSVLTFKVLDLKNYIDKQLLPILNKQSCSISNIETVIEFQQKNNRLLEITREFSVNAGVTTPVSTYMLTNSELLSLINDMPITNDQKKLMSNNVQIVRQQSYSIMCIIKEEVLAYVVQLPLYGVIDTPCWKLHTSPLCTTNTKEGSNICLTRTDRGWYCDNAGSVSFFPQAETCKVQSNRVFCDTMNSLTLPSEVNLCNVDIFNPKYDCKIMTSKTDVSSSVITSLGAIVSCYGKTKCTASNKNRGIIKTFSNGCDYVSNKGVDTVSVGNTLYYVNKQEGKSLYVKGEPIINFYDPLVFPSDEFDASISQVNEKINQSLAFIRGSGGSGSGEKAAKAEEAARKMEELFKKHKIVAVLRANSVEEAIEKAVAVFAGGVHLIEITFTVPDADTVIKALSVLKEKGAIIGAGTVTSVEQCRKAVESGAEFIVSPHLDEEISQFCKEKGVFYMPGVMTPTELVKAMKLGHTILKLFPGEVVGPQFVKAMKGPFPNVKFVPTGGVNLDNVCEWFKAGVLAVGVGSALVKGTPDEVREKAKAFVEKIRGCTE

SEQ ID NO: 176 - protein, 764 aa, Artificial Sequence
  Synthetic Peptide - RSV-compA fusion construct
MELLILKANAITTILTAVTFCFASGQNITEEFYQSTCSAVSKGYLSALRTGWYTSVITIELSNIKENKCNGTDAKVKLIKQELDKYKNAVTELQLLMQSTPATNNRARRELPRFMNYTLNNAKKTNVTLSKKRKRRFLGFLLGVGSAIASGVAVCKVLHLEGEVNKIKSALLSTNKAVVSLSNGVSVLTFKVLDLKNYIDKQLLPILNKQSCSISNIETVIEFQQKNNRLLEITREFSVNAGVTTPVSTYMLTNSELLSLINDMPITNDQKKLMSNNVQIVRQQSYSIMCIIKEEVLAYVVQLPLYGVIDTPCWKLHTSPLCTTNTKEGSNICLTRTDRGWYCDNAGSVSFFPQAETCKVQSNRVFCDTMNSLTLPSEVNLCNVDIFNPKYDCKIMTSKTDVSSSVITSLGAIVSCYGKTKCTASNKNRGIIKTFSNGCDYVSNKGVDTVSVGNTLYYVNKQEGKSLYVKGEPIINFYDPLVFPSDEFDASISQVNEKINQSLAFIRGYIPEAPRDGQAYVRKDGEWVLLSTFLGSGGSGSGSGGSGSGEKAAKAEEAARKMEELFKKHKIVAVLRANSVEEAIEKAVAVFAGGVHLIEITFTVPDADTVIKALSVLKEKGAIIGAGTVTSVEQCRKAVESGAEFIVSPHLDEEISQFCKEKGVFYMPGVMTPTELVKAMKLGHTILKLFPGEVVGPQFVKAMKGPFPNVKFVPTGGVNLDNVCEWFKAGVLAVGVGSALVKGTPDEVREKAKAFVEKIRGCTE

SEQ ID NO: 177 - protein, 774 aa, Artificial Sequence
  Synthetic Peptide - RSV-compA fusion construct
MSWKVVIIFSLLITPQHGLKESYLEESCSTITEGYLSVLRTGWYTNVFTLEVGDVENLTCSDGPSLIKTELDLTKSALRELKTVSADQLAREEQIENPRQSRFVLGAIALGVATAAAVTAGVAIAKTIRLESEVTAIKNALKTTNEAVSTLGNGVRVLATAVRELKDFVSKNLTRAINKNKCDIDDLKMAVSFSQFNRRFLNVVRQFSDNAGITPAISLDLMTDAELARAVSNMPTSAGQIKLMLENRAMVRRKGFGILIGVYGSSVIYMVQLPIFGVIDTPCWIVKAAPSCSGKKGNYACLLREDQGWYCQNAGSTVYYPNEKDCETRGDHVFCDTAAGINVAEQSKECNINISTTNYPCKVSTGRHPISMVALSPLGALVACYKGVSCSIGSNRVGIIKQLNKGCSYITNQDADTVTIDNTVYQLSKVEGEQHVIKGRPVSSSFDPIKFPEDQFNVALDQVFENIENSQALVDQSNRILSSAEKGNTGFIIVIILIAVLGSSMILVSIFIIIKKTKKPTGAPPELSGVTNNGFIPHSGSGSHHHHHHHHGGSGGSGSEKAAKAEEAARKMEELFKKHKIVAVLRANSVEEAIEKAVAVFAGGVHLIEITFTVPDADTVIKALSVLKEKGAIIGAGTVTSVEQCRKAVESGAEFIVSPHLDEEISQFCKEKGVFYMPGVMTPTELVKAMKLGHTILKLFPGEVVGPQFVKAMKGPFPNVKFVPTGGVNLDNVCEWFKAGVLAVGVGSALVKGTPDEVREKAKAFVEKIRGCTE

SEQ ID NO: 178 - protein, 725 aa, Artificial Sequence
  Synthetic Peptide - RSV-compA fusion construct
MSWKVVIIFSLLITPQHGLKESYLEESCSTITEGYLSVLRTGWYTNVFTLEVGDVENLTCSDGPSLIKTELDLTKSALRELKTVSADQLAREEQIENPRQSRFVLGAIALGVCTAAAVTAGVAIAKTIRLESEVTAIKNALKTTNEAVSTLGNGVRVLAFAVRELKDFVSKNLTRALNKNKCDIDDLKMAVSFSQFNRRFLNVVRQFSDNAGITPAISLDLMTDAELARAVSNMPTSAGQIKLMLENRAMVRRKGFGILIGVYGSSVIYMVQLPIFGVIDTPCWIVKAAPSCSGKKGNYACLLREDQGWYCQNAGSTVYYPNEKDCETRGDHVFCDTACGINVAEQSKECNINISTTNYPCKVSTGRHPISMVALSPLGALVACYKGVSCSIGSNRVGIIKQLNKGCSYITNQDADTVTIDNTVYQLSKVEGEQHVIKGRPVSSSFDPIKFPEDQFNVALDQVFENIENSQALVDQSNRILSSAEKGNTGGSGSHHHHHHHHGGSGGSGSEKAAKAEEAARKMEELFKKHKIVAVLRANSVEEAIEKAVAVFAGGVHLIEITFTVPDADTVIKALSVLKEKGAIIGAGTVTSVEQCRKAVESGAEFIVSPHLDEEISQFCKEKGVFYMPGVMTPTELVKAMKLGHTILKLFPGEVVGPQFVKAMKGPFPNVKFVPTGGVNLDNVCEWFKAGVLAVGVGSALVKGTPDEVREKAKAFVEKIRGCTE

SEQ ID NO: 179 - protein, 725 aa, Artificial Sequence
  Synthetic Peptide - RSV-compA fusion construct
MSWKVVIIFSLLITPQHGLKESYLEESCSTITEGYLSVLRTGWYTNVFTLEVGDVENLTCSDGPSLIKTELDLTKSALRELKTVSADQLAREEQIENPRQSRFVLGAIALGVCTAAAVTCGVAIAKTIRLESEVTAIKNALKTTNEAVSTLGNGVRVLAFAVRELKDFVSKNLTRALNKNKCDIDDLKMAVSFSQFNRRFLNVVRQFSDNAGITPAISLDLMTDAELARAVSNMPTSAGQIKLMLENRAMVRRKGFGILIGVYGSSVIYMVQLPIFGVIDTPCWIVKAAPSCSGKKGNYACLLREDQGWYCQNAGSTVYYPNEKDCETRGDHVFCDTACGINVAEQSKECNINISTTNYPCKVSTGRHPISMVALSPLGALVACYKGVSCSIGSNRVGIIKQLNKGCSYITNQDADTVTIDNTVYCLSKVEGEQHVIKGRPVSSSFDPIKFPEDQFNVALDQVFENIENSQALVDQSNRILSSAEKGNTGGSGSHHHHHHHHGGSGGSGSEKAAKAEEAARKMEELFKKHKIVAVLRANSVEEAIEKAVAVFAGGVHLIEITFTVPDADTVIKALSVLKEKGAIIGAGTVTSVEQCRKAVESGAEFIVSPHLDEEISQFCKEKGVFYMPGVMTPTELVKAMKLGHTILKLFPGEVVGPQFVKAMKGPFPNVKFVPTGGVNLDNVCEWFKAGVLAVGVGSALVKGTPDEVREKAKAFVEKIRGCTE

SEQ ID NO: 180 - protein, 703 aa, Artificial Sequence
  Synthetic Peptide - RSV-compA fusion construct
MELLILKANAITTILTAVTFCFASGQNITEEFYQSTCSAVSKGYLSALRTGWYTSVITIELSNIKENKCNGTDAKVKLIKQELDKYKNAVTELQLLMQSTPATGSGSCIASGVAVCKVLHLEGEVNKIKSALLSTNKAVVSLSNGVSVLTFKVLDLKNYIDKQLLPILNKQSCSISNIETVIEFQQKNNRLLEITREFSVNAGVTTPVSTYMLTNSELLSLINDMPITNDQKKLMSNNVQIVRQQSYSIMCIIKEEVLAYVVQLPLYGVIDTPCWKLHTSPLCTTNTKEGSNICLTRTDRGWYCDNAGSVSFFPQAETCKVQSNRVFCDTMNSLTLPSEVNLCNVDIFNPKYDCKIMTSKTDVSSSVITSLGAIVSCYGKTKCTASNKNRGIIKTFSNGCDYVSNKGVDTVSVGNTLYCVNKQEGKSLYVKGEPIINFYDPLVFPSDEFDASISQVNEKINQSLAFIRGSGSHHHHHHHHGGSGGSGSEKAAKAEEAARKMEELFKKHKIVAVLRANSVEEAIEKAVAVFAGGVHLIEITFTVPDADTVIKALSVLKEKGAIIGAGTVTSVEQCRKAVESGAEFIVSPHLDEEISQFCKEKGVFYMPGVMTPTELVKAMKLGHTILKLFPGEVVGPQFVKAMKGPFPNVKFVPTGGVNLDNVCEWFKAGVLAVGVGSALVKGTPDEVREKAKAFVEKIRGCTE

SEQ ID NO: 181 - protein, 742 aa, Artificial Sequence
  Synthetic Peptide - RSV-compA fusion construct
MELLILKANAITTILTAVTFCFASGQNITEEFYQSTCSAVSKGYLSALRTGWYTSVITIELSNIKENKCNGTDAKVKLIKQELDKYKNAVTELQLLMQSTPATNNRARRELPRFMNYTLNNAKKTNVTLSKKRKRRFLGFLLGVGSCIASGVAVCKVLHLEGEVNKIKSALLSTNKAVVSLSNGVSVLTFKVLDLKNYIDKQLLPILNKQSCSISNIETVIEFQQKNNRLLEITREFSVNAGVTTPVSTYMLTNSELLSLINDMPITNDQKKLMSNNVQIVRQQSYSIMCIIKEEVLAYVVQLPLYGVIDTPCWKLHTSPLCTTNTKEGSNICLTRTDRGWYCDNAGSVSFFPQAETCKVQSNRVFCDTMNSLTLPSEVNLCNVDIFNPKYDCKIMTSKTDVSSSVITSLGAIVSCYGKTKCTASNKNRGIIKTFSNGCDYVSNKGVDTVSVGNTLYCVNKQEGKSLYVKGEPIINFYDPLVFPSDEFDASISQVNEKINQSLAFIRGSGSHHHHHHHHGGSGGSGSEKAAKAEEAARKMEELFKKHKIVAVLRANSVEEAIEKAVAVFAGGVHLIEITFTVPDADTVIKALSVLKEKGAIIGAGTVTSVEQCRKAVESGAEFIVSPHLDEEISQFCKEKGVFYMPGVMTPTELVKAMKLGHTILKLFPGEVVGPQFVKAMKGPFPNVKFVPTGGVNLDNVCEWFKAGVLAVGVGSALVKGTPDEVREKAKAFVEKIRGCTE

SEQ ID NO: 182 - protein, 734 aa, Artificial Sequence
  Synthetic Peptide - RSV-compA fusion construct
MELLILKANAITTILTAVTFCFASGQNITEEFYQSTCSAVSKGYLSALRTGWYTSVITIELSNIKENKCNGTDAKVKLIKQELDKYKNAVTELQLLMQSTPATNNRARRELPRFMNYTLNNAKKTNVTLSKKRKRRFLGFLLGVGSAIASGVAVCKVLHLEGEVNKIKSALLSTNKAVVSLSNGVSVLTFKVLDLKNYIDKQLLPILNKQSCSISNIETVIEFQQKNNRLLEITREFSVNAGVTTPVSTYMLTNSELLSLINDMPITNDQKKLMSNNVQIVRQQSYSIMCIIKEEVLAYVVQLPLYGVIDTPCWKLHTSPLCTTNTKEGSNICLTRTDRGWYCDNAGSVSFFPQAETCKVQSNRVFCDTMNSLTLPSEVNLCNVDIFNPKYDCKIMTSKTDVSSSVITSLGAIVSCYGKTKCTASNKNRGIIKTFSNGCDYVSNKGVDTVSVGNTLYYVNKQEGKSLYVKGEPIINFYDPLVFPSDEFDASISQVNEKINQSLAFIRGSGGSGSGSGGSEKAAKAEEAARKMEELFKKHKIVAVLRANSVEEAIEKAVAVFAGGVHLIEITFTVPDADTVIKALSVLKEKGAIIGAGTVTSVEQCRKAVESGAEFIVSPHLDEEISQFCKEKGVFYMPGVMTPTELVKAMKLGHTILKLFPGEVVGPQFVKAMKGPFPNVKFVPTGGVNLDNVCEWFKAGVLAVGVGSALVKGTPDEVREKAKAFVEKIRGCTE

SEQ ID NO: 183 - protein, 738 aa, Artificial Sequence
  Synthetic Peptide - RSV-compA fusion construct
MELLILKANAITTILTAVTFCFASGQNITEEFYQSTCSAVSKGYLSALRTGWYTSVITIELSNIKENKCNGTDAKVKLIKQELDKYKNAVTELQLLMQSTPATNNRARRELPRFMNYTLNNAKKTNVTLSKKRKRRFLGFLLGVGSAIASGVAVCKVLHLEGEVNKIKSALLSTNKAVVSLSNGVSVLTFKVLDLKNYIDKQLLPILNKQSCSISNIETVIEFQQKNNRLLEITREFSVNAGVTTPVSTYMLTNSELLSLINDMPITNDQKKLMSNNVQIVRQQSYSIMCIIKEEVLAYVVQLPLYGVIDTPCWKLHTSPLCTTNTKEGSNICLTRTDRGWYCDNAGSVSFFPQAETCKVQSNRVFCDTMNSLTLPSEVNLCNVDIFNPKYDCKIMTSKTDVSSSVITSLGAIVSCYGKTKCTASNKNRGIIKTFSNGCDYVSNKGVDTVSVGNTLYYVNKQEGKSLYVKGEPIINFYDPLVFPSDEFDASISQVNEKINQSLAFIRGSGGSGSGSGGSGSGGEKAAKAEEAARKMEELFKKHKIVAVLRANSVEEAIEKAVAVFAGGVHLIEITFTVPDADTVIKALSVLKEKGAIIGAGTVTSVEQCRKAVESGAEFIVSPHLDEEISQFCKEKGVFYMPGVMTPTELVKAMKLGHTILKLFPGEVVGPQFVKAMKGPFPNVKFVPTGGVNLDNVCEWFKAGVLAVGVGSALVKGTPDEVREKAKAFVEKIRGCTE

SEQ ID NO: 184 - protein, 759 aa, Artificial Sequence
  Synthetic Peptide - RSV-compA fusion construct
MELLILKANAITTILTAVTFCFASGQNITEEFYQSTCSAVSKGYLSALRTGWYTSVITIELSNIKENKCNGTDAKVKLIKQELDKYKNAVTELQLLMQSTPATNNRARRELPRFMNYTLNNAKKTNVTLSKKRKRRFLGFLLGVGSAIASGVAVCKVLHLEGEVNKIKSALLSTNKAVVSLSNGVSVLTFKVLDLKNYIDKQLLPILNKQSCSISNIETVIEFQQKNNRLLEITREFSVNAGVTTPVSTYMLTNSELLSLINDMPITNDQKKLMSNNVQIVRQQSYSIMCIIKEEVLAYVVQLPLYGVIDTPCWKLHTSPLCTTNTKEGSNICLTRTDRGWYCDNAGSVSFFPQAETCKVQSNRVFCDTMNSLTLPSEVNLCNVDIFNPKYDCKIMTSKTDVSSSVITSLGAIVSCYGKTKCTASNKNRGIIKTFSNGCDYVSNKGVDTVSVGNTLYYVNKQEGKSLYVKGEPIINFYDPLVFPSDEFDASISQVNEKINQSLAFIRGYIPEAPRDGQAYVRKDGEWVLLSTFLGSGGSGSGSGEKAAKAEEAARKMEELFKKHKIVAVLRANSVEEAIEKAVAVFAGGVHLIEITFTVPDADTVIKALSVLKEKGAIIGAGTVTSVEQCRKAVESGAEFIVSPHLDEEISQFCKEKGVFYMPGVMTPTELVKAMKLGHTILKLFPGEVVGPQFVKAMKGPFPNVKFVPTGGVNLDNVCEWFKAGVLAVGVGSALVKGTPDEVREKAKAFVEKIRGCTE

SEQ ID NO: 185 - protein, 769 aa, Artificial Sequence
  Synthetic Peptide - RSV-compA fusion construct
MELLILKANAITTILTAVTFCFASGQNITEEFYQSTCSAVSKGYLSALRTGWYTSVITIELSNIKENKCNGTDAKVKLIKQELDKYKNAVTELQLLMQSTPATNNRARRELPRFMNYTLNNAKKTNVTLSKKRKRRFLGFLLGVGSAIASGVAVCKVLHLEGEVNKIKSALLSTNKAVVSLSNGVSVLTFKVLDLKNYIDKQLLPILNKQSCSISNIETVIEFQQKNNRLLEITREFSVNAGVTTPVSTYMLTNSELLSLINDMPITNDQKKLMSNNVQIVRQQSYSIMCIIKEEVLAYVVQLPLYGVIDTPCWKLHTSPLCTTNTKEGSNICLTRTDRGWYCDNAGSVSFFPQAETCKVQSNRVFCDTMNSLTLPSEVNLCNVDIFNPKYDCKIMTSKTDVSSSVITSLGAIVSCYGKTKCTASNKNRGIIKTFSNGCDYVSNKGVDTVSVGNTLYYVNKQEGKSLYVKGEPIINFYDPLVFPSDEFDASISQVNEKINQSLAFIRGYIPEAPRDGQAYVRKDGEWVLLSTFLGSGGSGSGSGGSGSGGSSGSEKAAKAEEAARKMEELFKKHKIVAVLRANSVEEAIEKAVAVFAGGVHLIEITFTVPDADTVIKALSVLKEKGAIIGAGTVTSVEQCRKAVESGAEFIVSPHLDEEISQFCKEKGVFYMPGVMTPTELVKAMKLGHTILKLFPGEVVGPQFVKAMKGPFPNVKFVPTGGVNLDNVCEWFKAGVLAVGVGSALVKGTPDEVREKAKAFVEKIRGCTE

SEQ ID NO: 186 - protein, 736 aa, Artificial Sequence
  Synthetic Peptide - RSV-compA fusion construct
MELLILKANAITTILTAVTFCFASGQNITEEFYQSTCSAVSKGYLSALRTGWYTSVITIELSNIKENKCNGTDAKVKLIKQELDKYKNAVTELQLLMQSTPATGSGSAICSGVAVCKVLHLEGEVNKIKSALLSTNKAVVSLSNGVSVLTFKVLDLKNYIDKQLLPILNKQSCSISNIETVIEFQQKNNRLLEITREFSVNAGVTTPVSTYMLTNSELLSLINDMPITNDQKKLMSNNVQIVRQQSYSIMCIIKEEVLAYVVQLPLYGVIDTPCWKLHTSPLCTTNTKEGSNICLTRTDRGWYCDNAGSVSFFPQAETCKVQSNRVFCDTMNSRTLPSEVNLCNVDIFNPKYDCKIMTSKTDVSSSVITSLGAIVSCYGKTKCTASNKNRGIIKTFSNGCDYVSNKGVDTVSVGNTLYCVNKQEGKSLYVKGEPIINFYDPLVFPSDEFDASISQVNEKINQSLAFIRKSDELLGYIPEAPRDGQAYVRKDGEWVLLSTFLGSGSHHHHHHHHGGSGGSGSEKAAKAEEAARKMEELFKKHKIVAVLRANSVEEAIEKAVAVFAGGVHLIEITFTVPDADTVIKALSVLKEKGAIIGAGTVTSVEQCRKAVESGAEFIVSPHLDEEISQFCKEKGVFYMPGVMTPTELVKAMKLGHTILKLFPGEVVGPQFVKAMKGPFPNVKFVPTGGVNLDNVCEWFKAGVLAVGVGSALVKGTPDEVREKAKAFVEKIRGCTE

SEQ ID NO: 187 - protein, 697 aa, Artificial Sequence
  Synthetic Peptide - RSV-compA fusion construct
MELLILKANAITTILTAVTFCFASGQNITEEFYQSTCSAVSKGYLSALRTGWYTSVITIELSNIKENKCNGTDAKVKLIKQELDKYKNAVTELQLLMQSTPATGSGSAICSGVAVCKVLHLEGEVNKIKSALLSTNKAVVSLSNGVSVLTFKVLDLKNYIDKQLLPILNKQSCSISNIETVIEFQQKNNRLLEITREFSVNAGVTTPVSTYMLTNSELLSLINDMPITNDQKKLMSNNVQIVRQQSYSIMCIIKEEVLAYVVQLPLYGVIDTPCWKLHTSPLCTTNTKEGSNICLTRTDRGWYCDNAGSVSFFPQAETCKVQSNRVFCDTMNSRTLPSEVNLCNVDIFNPKYDCKIMTSKTDVSSSVITSLGAIVSCYGKTKCTASNKNRGIIKTFSNGCDYVSNKGVDTVSVGNTLYCVNKQEGKSLYVKGEPIINFYDPLVFPSDEFDASISQVNEKINQSLAFIRKSDELLGSGGSGSGEKAAKAEEAARKMEELFKKHKIVAVLRANSVEEAIEKAVAVFAGGVHLIEITFTVPDADTVIKALSVLKEKGAIIGAGTVTSVEQCRKAVESGAEFIVSPHLDEEISQFCKEKGVFYMPGVMTPTELVKAMKLGHTILKLFPGEVVGPQFVKAMKGPFPNVKFVPTGGVNLDNVCEWFKAGVLAVGVGSALVKGTPDEVREKAKAFVEKIRGCTE

SEQ ID NO: 188 - protein, 736 aa, Artificial Sequence
  Synthetic Peptide - RSV-compA fusion construct
MELLILKANAITTILTAVTFCFASGQNITEEFYQSTCSAVSKGYLGALRTGWYTSVITIELSNIKENKCNGTDAKVKLIKQELDKYKNAVTDLQLLMQSTPATGSGSAICSGVAVCKVLHLEGEVNKIKSALLSTNKAVVSLSNGVSVLTFKVLDLKNYIDKQLLPILNKQSCSIPNIETVIEFQQKNNRLLEITREFSVNAGVTTPVSTYMLTNSELLSLINDMPITNDQKKLMSNNVQIVRQQSYSIMCIIKEEVLAYVVQLPLYGVIDTPCWKLHTSPLCTTNTKEGSNICLTRTDRGWYCDNAGSVSFFPQAETCKVQSNRVFCDTMNSRTLPSEVNLCNVDIFNPKYDCKIMTSKTDVSSSVITSLGAIVSCYGKTKCTASNKNRGIIKTFSNGCDYVSNKGVDTVSVGNTLYCVNKQEGQSLYVKGEPIINFYDPLVFPSDEFDASISQVNEKINQSLAFIRKSDELLGYIPEAPRDGQAYVRKDGEWVLLSTFLGSGSHHHHHHHHGGSGGSGSEKAAKAEEAARKMEELFKKHKIVAVLRANSVEEAIEKAVAVFAGGVHLIEITFTVPDADTVIKALSVLKEKGAIIGAGTVTSVEQCRKAVESGAEFIVSPHLDEEISQFCKEKGVFYMPGVMTPTELVKAMKLGHTILKLFPGEVVGPQFVKAMKGPFPNVKFVPTGGVNLDNVCEWFKAGVLAVGVGSALVKGTPDEVREKAKAFVEKIRGCTE

SEQ ID NO: 189 - protein, 697 aa, Artificial Sequence
  Synthetic Peptide - RSV-compA fusion construct
MELLILKANAITTILTAVTFCFASGQNITEEFYQSTCSAVSKGYLGALRTGWYTSVITIELSNIKENKCNGTDAKVKLIKQELDKYKNAVTDLQLLMQSTPATGSGSAICSGVAVCKVLHLEGEVNKIKSALLSTNKAVVSLSNGVSVLTFKVLDLKNYIDKQLLPILNKQSCSIPNIETVIEFQQKNNRLLEITREFSVNAGVTTPVSTYMLTNSELLSLINDMPITNDQKKLMSNNVQIVRQQSYSIMCIIKEEVLAYVVQLPLYGVIDTPCWKLHTSPLCTTNTKEGSNICLTRTDRGWYCDNAGSVSFFPQAETCKVQSNRVFCDTMNSRTLPSEVNLCNVDIFNPKYDCKIMTSKTDVSSSVITSLGAIVSCYGKTKCTASNKNRGIIKTFSNGCDYVSNKGVDTVSVGNTLYCVNKQEGQSLYVKGEPIINFYDPLVFPSDEFDASISQVNEKINQSLAFIRKSDELLGSGGSGSGEKAAKAEEAARKMEELFKKHKIVAVLRANSVEEAIEKAVAVFAGGVHLIEITFTVPDADTVIKALSVLKEKGAIIGAGTVTSVEQCRKAVESGAEFIVSPHLDEEISQFCKEKGVFYMPGVMTPTELVKAMKLGHTILKLFPGEVVGPQFVKAMKGPFPNVKFVPTGGVNLDNVCEWFKAGVLAVGVGSALVKGTPDEVREKAKAFVEKIRGCTE

SEQ ID NO: 190 - protein, 753 aa, Artificial Sequence
  Synthetic Peptide - RSV-compA fusion construct
MELLILKANAITTILTAVTFCFASGQNITEEFYQSTCSAVSKGYLSALRTGWYTSVITIELSNIKKIKCNGTDAKIKLIKQELDKYKNAVTELQLLMQSTPATNNQARGSGSGRSLGFLLGVGSAIASGVAVSKVLHLEGEVNKIKSALLSTNKAVVSLSNGVSVLTSKVLDLKNYIDKQLLPIVNKQSCSIPNIETVIEFQQKNNRLLEITREFSVNAGVTTPVSTYMLTNSELLSLINDMPITNDQKKLMSNNVQIVRQQSYSIMSIIKEEVLAYVVQLPLYGVIDTPCWKLHTSPLCTTNTKEGSNICLTRTDRGWYCDNAGSVSFFPQAETCKVQSNRVFCDTMNSLTLPSEVNLCNVDIFNPKYDCKIMTSKTDVSSSVITSLGAIVSCYGKTKCTASNKNRGIIKTFSNGCDYVSNKGVDTVSVGNTLYYVNKQEGKSLYVKGEPIINFYDPLVFPSDEFDASISQVNEKINQSLAFIRKSDELLGYIPEAPRDGQAYVRKDGEWVLLSTFLGSGSHHHHHHHHGGSGGSGSEKAAKAEEAARKMEELFKKHKIVAVLRANSVEEAIEKAVAVFAGGVHLIEITFTVPDADTVIKALSVLKEKGAIIGAGTVTSVEQCRKAVESGAEFIVSPHLDEEISQFCKEKGVFYMPGVMTPTELVKAMKLGHTILKLFPGEVVGPQFVKAMKGPFPNVKFVPTGGVNLDNVCEWFKAGVLAVGVGSALVKGTPDEVREKAKAFVEKIRGCTE

SEQ ID NO: 191 - protein, 714 aa, Artificial Sequence
  Synthetic Peptide - RSV-compA fusion construct
MELLILKANAITTILTAVTFCFASGQNITEEFYQSTCSAVSKGYLSALRTGWYTSVITIELSNIKKIKCNGTDAKIKLIKQELDKYKNAVTELQLLMQSTPATNNQARGSGSGRSLGFLLGVGSAIASGVAVSKVLHLEGEVNKIKSALLSTNKAVVSLSNGVSVLTSKVLDLKNYIDKQLLPIVNKQSCSIPNIETVIEFQQKNNRLLEITREFSVNAGVTTPVSTYMLTNSELLSLINDMPITNDQKKLMSNNVQIVRQQSYSIMSIIKEEVLAYVVQLPLYGVIDTPCWKLHTSPLCTTNTKEGSNICLTRTDRGWYCDNAGSVSFFPQAETCKVQSNRVFCDTMNSLTLPSEVNLCNVDIFNPKYDCKIMTSKTDVSSSVITSLGAIVSCYGKTKCTASNKNRGIIKTFSNGCDYVSNKGVDTVSVGNTLYYVNKQEGKSLYVKGEPIINFYDPLVFPSDEFDASISQVNEKINQSLAFIRKSDELLGSGGSGSGEKAAKAEEAARKMEELFKKHKIVAVLRANSVEEAIEKAVAVFAGGVHLIEITFTVPDADTVIKALSVLKEKGAIIGAGTVTSVEQCRKAVESGAEFIVSPHLDEEISQFCKEKGVFYMPGVMTPTELVKAMKLGHTILKLFPGEVVGPQFVKAMKGPFPNVKFVPTGGVNLDNVCEWFKAGVLAVGVGSALVKGTPDEVREKAKAFVEKIRGCTE

SEQ ID NO: 192 - protein, 753 aa, Artificial Sequence
  Synthetic Peptide - RSV-compA fusion construct
MELLILKANAITTILTAVTFCFASGQNITEEFYQSTCSAVSKGYLSALRTGWYTSVITIELSNIKKIKCNGTDAKIKLIKQELDKYKNAVTELQLLMQSTPATNNQARGSGSGRSLGFLLGVGSAIASGVAVSKVLHLEGEVNKIKSALLSTNKAVVSLSNGVSVLTSKVLDLKNYIDKQLLPIVNKQSCSIPNIETVIEFQQKNNRLLEITREFSVNAGVTTPVSTYMLTNSELLSLINDMPITNDQKKLMSNNVQIVRQQSYSIMSIIKEEVLAYVVQLPLYGVIDTPCWKLHTSPLCTTNTKEGSNICLTRTDRGWYCDNAGSVSFFPQAETCKVQSNRVFCDTMNSLTLPSEVNLCNVDIFNPKYDCKIMTSKTDVSSSVITSLGAIVSCYGKTKCTASNKNRGIIKTFSNGCDYVSNKGVDTVSVGNTLYYVNKQEGKSLYVKGEPIINFYDPLVFPSDQFDASISQVNEKINQSLAFIRKSDELLGYIPEAPRDGQAYVRKDGEWVLLSTFLGSGSHHHHHHHHGGSGGSGSEKAAKAEEAARKMEELFKKHKIVAVLRANSVEEAIEKAVAVFAGGVHLIEITFTVPDADTVIKALSVLKEKGAIIGAGTVTSVEQCRKAVESGAEFIVSPHLDEEISQFCKEKGVFYMPGVMTPTELVKAMKLGHTILKLFPGEVVGPQFVKAMKGPFPNVKFVPTGGVNLDNVCEWFKAGVLAVGVGSALVKGTPDEVREKAKAFVEKIRGCTE

SEQ ID NO: 193 - protein, 714 aa, Artificial Sequence
  Synthetic Peptide - RSV-compA fusion construct
MELLILKANAITTILTAVTFCFASGQNITEEFYQSTCSAVSKGYLSALRTGWYTSVITIELSNIKKIKCNGTDAKIKLIKQELDKYKNAVTELQLLMQSTPATNNQARGSGSGRSLGFLLGVGSAIASGVAVSKVLHLEGEVNKIKSALLSTNKAVVSLSNGVSVLTSKVLDLKNYIDKQLLPIVNKQSCSIPNIETVIEFQQKNNRLLEITREFSVNAGVTTPVSTYMLTNSELLSLINDMPITNDQKKLMSNNVQIVRQQSYSIMSIIKEEVLAYVVQLPLYGVIDTPCWKLHTSPLCTTNTKEGSNICLTRTDRGWYCDNAGSVSFFPQAETCKVQSNRVFCDTMNSLTLPSEVNLCNVDIFNPKYDCKIMTSKTDVSSSVITSLGAIVSCYGKTKCTASNKNRGIIKTFSNGCDYVSNKGVDTVSVGNTLYYVNKQEGKSLYVKGEPIINFYDPLVFPSDQFDASISQVNEKINQSLAFIRKSDELLGSGGSGSGEKAAKAEEAARKMEELFKKHKIVAVLRANSVEEAIEKAVAVFAGGVHLIEITFTVPDADTVIKALSVLKEKGAIIGAGTVTSVEQCRKAVESGAEFIVSPHLDEEISQFCKEKGVFYMPGVMTPTELVKAMKLGHTILKLFPGEVVGPQFVKAMKGPFPNVKFVPTGGVNLDNVCEWFKAGVLAVGVGSALVKGTPDEVREKAKAFVEKIRGCTE

SEQ ID NO: 194 - protein, 752 aa, Artificial Sequence
  Synthetic Peptide - hMPV-compA fusion construct
MSWKVVIIFSLLITPQHGLKESYLEESCSTITEGYLSVLRTGWYTNVFTLEVGDVENLTCSDGPSLIKTELDLTKSALRELKTVSADQLAREEQIENPRQSRFVLGAIALGVCTAAAVTAGVAIAKTIRLESEVTAIKNALKTTNEAVSTLGNGVRVLAFAVRELKDFVSKNLTRALNKNKCDIDDLKMAVSFSQFNRRFLNVVRQFSDNAGITPAISLDLMTDAELARAVSNMPTSAGQIKLMLENRAMVRRKGFGILIGVYGSSVIYMVQLPIFGVIDTPCWIVKAAPSCSGKKGNYACLLREDQGWYCQNAGSTVYYPNEKDCETRGDHVFCDTACGINVAEQSKECNINISTTNYPCKVSTGRHPISMVALSPLGALVACYKGVSCSIGSNRVGIIKQLNKGCSYITNQDADTVTIDNTVYQLSKVEGEQHVIKGRPVSSSFDPIKFPEDQFNVALDQVFENIENSQALVDQSNRILSSAEKGNTGGYIPEAPRDGQAYVRKDGEWVLLSTFLGSGSHHHHHHHHGGSGGSGSEKAAKAEEAARKMEELFKKHKIVAVLRANSVEEAIEKAVAVFAGGVHLIEITFTVPDADTVIKALSVLKEKGAIIGAGTVTSVEQCRKAVESGAEFIVSPHLDEEISQFCKEKGVFYMPGVMTPTELVKAMKLGHTILKLFPGEVVGPQFVKAMKGPFPNVKFVPTGGVNLDNVCEWFKAGVLAVGVGSALVKGTPDEVREKAKAFVEKIRGCTE

SEQ ID NO: 195 - protein, 713 aa, Artificial Sequence
  Synthetic Peptide - hMPV-compA fusion construct
MSWKVVIIFSLLITPQHGLKESYLEESCSTITEGYLSVLRTGWYTNVFTLEVGDVENLTCSDGPSLIKTELDLTKSALRELKTVSADQLAREEQIENPRQSRFVLGAIALGVCTAAAVTAGVAIAKTIRLESEVTAIKNALKTTNEAVSTLGNGVRVLAFAVRELKDFVSKNLTRALNKNKCDIDDLKMAVSFSQFNRRFLNVVRQFSDNAGITPAISLDLMTDAELARAVSNMPTSAGQIKLMLENRAMVRRKGFGILIGVYGSSVIYMVQLPIFGVIDTPCWIVKAAPSCSGKKGNYACLLREDQGWYCQNAGSTVYYPNEKDCETRGDHVFCDTACGINVAEQSKECNINISTTNYPCKVSTGRHPISMVALSPLGALVACYKGVSCSIGSNRVGIIKQLNKGCSYITNQDADTVTIDNTVYQLSKVEGEQHVIKGRPVSSSFDPIKFPEDQFNVALDQVFENIENSQALVDQSNRILSSAEKGNTGGSGGSGSGEKAAKAEEAARKMEELFKKHKIVAVLRANSVEEAIEKAVAVFAGGVHLIEITFTVPDADTVIKALSVLKEKGAIIGAGTVTSVEQCRKAVESGAEFIVSPHLDEEISQFCKEKGVFYMPGVMTPTELVKAMKLGHTILKLFPGEVVGPQFVKAMKGPFPNVKFVPTGGVNLDNVCEWFKAGVLAVGVGSALVKGTPDEVREKAKAFVEKIRGCTE

SEQ ID NO: 196 - protein, 752 aa, Artificial Sequence
  Synthetic Peptide - hMPV-compA fusion construct
MSWKVVIIFSLLITPQHGLKESYLEESCSTITEGYLSVLRTGWYTNVFTLEVGDVENLTCSDGPSLIKTELDLTKSALRELKTVSADQLAREEQIENPRQSRFVLGAIALGVCTAAAVTCGVAIAKTIRLESEVTAIKNALKTTNEAVSTLGNGVRVLAFAVRELKDFVSKNLTRALNKNKCDIDDLKMAVSFSQFNRRFLNVVRQFSDNAGITPAISLDLMTDAELARAVSNMPTSAGQIKLMLENRAMVRRKGFGILIGVYGSSVIYMVQLPIFGVIDTPCWIVKAAPSCSGKKGNYACLLREDQGWYCQNAGSTVYYPNEKDCETRGDHVFCDTACGINVAEQSKECNINISTTNYPCKVSTGRHPISMVALSPLGALVACYKGVSCSIGSNRVGIIKQLNKGCSYITNQDADTVTIDNTVYCLSKVEGEQHVIKGRPVSSSFDPIKFPEDQFNVALDQVFENIENSQALVDQSNRILSSAEKGNTGGYIPEAPRDGQAYVRKDGEWVLLSTFLGSGSHHHHHHHHGGSGGSGSEKAAKAEEAARKMEELFKKHKIVAVLRANSVEEAIEKAVAVFAGGVHLIEITFTVPDADTVIKALSVLKEKGAIIGAGTVTSVEQCRKAVESGAEFIVSPHLDEEISQFCKEKGVFYMPGVMTPTELVKAMKLGHTILKLFPGEVVGPQFVKAMKGPFPNVKFVPTGGVNLDNVCEWFKAGVLAVGVGSALVKGTPDEVREKAKAFVEKIRGCTE

SEQ ID NO: 197 - protein, 713 aa, Artificial Sequence
  Synthetic Peptide - hMPV-compA fusion construct
MSWKVVIIFSLLITPQHGLKESYLEESCSTITEGYLSVLRTGWYTNVFTLEVGDVENLTCSDGPSLIKTELDLTKSALRELKTVSADQLAREEQIENPRQSRFVLGAIALGVCTAAAVTCGVAIAKTIRLESEVTAIKNALKTTNEAVSTLGNGVRVLAFAVRELKDFVSKNLTRALNKNKCDIDDLKMAVSFSQFNRRFLNVVRQFSDNAGITPAISLDLMTDAELARAVSNMPTSAGQIKLMLENRAMVRRKGFGILIGVYGSSVIYMVQLPIFGVIDTPCWIVKAAPSCSGKKGNYACLLREDQGWYCQNAGSTVYYPNEKDCETRGDHVFCDTACGINVAEQSKECNINISTTNYPCKVSTGRHPISMVALSPLGALVACYKGVSCSIGSNRVGIIKQLNKGCSYITNQDADTVTIDNTVYCLSKVEGEQHVIKGRPVSSSFDPIKFPEDQFNVALDQVFENIENSQALVDQSNRILSSAEKGNTGGSGGSGSGEKAAKAEEAARKMEELFKKHKIVAVLRANSVEEAIEKAVAVFAGGVHLIEITFTVPDADTVIKALSVLKEKGAIIGAGTVTSVEQCRKAVESGAEFIVSPHLDEEISQFCKEKGVFYMPGVMTPTELVKAMKLGHTILKLFPGEVVGPQFVKAMKGPFPNVKFVPTGGVNLDNVCEWFKAGVLAVGVGSALVKGTPDEVREKAKAFVEKIRGCTE

SEQ ID NO: 198 - protein, 751 aa, Artificial Sequence
  Synthetic Peptide - hMPV-compA fusion construct
MSWKVVIIFSLLITPQHGLKESYLEESCSTITEGYLSVLRTGWYTNVFTLEVGDVENLTCADGPSLIKTELDLTKSALRELRTVSADQLAREEQIENPRRRRFVLGAIALGVATAAAVTAGVAIAKTIRLESEVTAIKNALKKTNEAVSTLGNGVRVLATAVRELKDFVSKNLTRAINKNKCDIPDLKMAVSFSQFNRRFLNVVRQFSDNAGITPAISLDLMTDAELARAVSNMPTSAGQIKLMLENRAMVRRKGFGILIGVYGSSVIYMVQLPIFGVIDTPCWIVKAAPSCSEKKGNYACLLREDQGWYCQNAGSTVYYPNEKDCETRGDHVFCDTAAGINVAEQSKECNINISTTNYPCKVSTGRHPISMVALSPLGALVACYKGVSCSIGSNRVGIIKQLNKGCSYITNQDADTVTIDNTVYQLSKVEGEQHVIKGRPVSSSFDPVKFPEDQFNVALDQVFESIENSQALVDQSNRILSSAEKGNTGYIPEAPRDGQAYVRKDGEWVLLSTFLGSGSHHHHHHHHGGSGGSGSEKAAKAEEAARKMEELFKKHKIVAVLRANSVEEAIEKAVAVFAGGVHLIEITFTVPDADTVIKALSVLKEKGAIIGAGTVTSVEQCRKAVESGAEFIVSPHLDEEISQFCKEKGVFYMPGVMTPTELVKAMKLGHTILKLFPGEVVGPQFVKAMKGPFPNVKFVPTGGVNLDNVCEWFKAGVLAVGVGSALVKGTPDEVREKAKAFVEKIRGCTE

SEQ ID NO: 199 - protein, 712 aa, Artificial Sequence
  Synthetic Peptide - hMPV-compA fusion construct
MSWKVVIIFSLLITPQHGLKESYLEESCSTITEGYLSVLRTGWYTNVFTLEVGDVENLTCADGPSLIKTELDLTKSALRELRTVSADQLAREEQIENPRRRRFVLGAIALGVATAAAVTAGVAIAKTIRLESEVTAIKNALKKTNEAVSTLGNGVRVLATAVRELKDFVSKNLTRAINKNKCDIPDLKMAVSFSQFNRRFLNVVRQFSDNAGITPAISLDLMTDAELARAVSNMPTSAGQIKLMLENRAMVRRKGFGILIGVYGSSVIYMVQLPIFGVIDTPCWIVKAAPSCSEKKGNYACLLREDQGWYCQNAGSTVYYPNEKDCETRGDHVFCDTAAGINVAEQSKECNINISTTNYPCKVSTGRHPISMVALSPLGALVACYKGVSCSIGSNRVGIIKQLNKGCSYITNQDADTVTIDNTVYQLSKVEGEQHVIKGRPVSSSFDPVKFPEDQFNVALDQVFESIENSQALVDQSNRILSSAEKGNTGSGGSGSGEKAAKAEEAARKMEELFKKHKIVAVLRANSVEEAIEKAVAVFAGGVHLIEITFTVPDADTVIKALSVLKEKGAIIGAGTVTSVEQCRKAVESGAEFIVSPHLDEEISQFCKEKGVFYMPGVMTPTELVKAMKLGHTILKLFPGEVVGPQFVKAMKGPFPNVKFVPTGGVNLDNVCEWFKAGVLAVGVGSALVKGTPDEVREKAKAFVEKIRGCTE

SEQ ID NO: 200 - protein, 435 aa, Artificial Sequence
  Synthetic Peptide - RBD-compA fusion construct
RFPNITNLCPFGEVFNATRFASVYAWNRKRISNCVADYSVLYNSASFSTFKCYGVSPTKLNDLCFTNVYADSFVIRGDEVRQIAPGQTGKIADYNYKLPDDFTGCVIAWNSNNLDSKVGGNYNYLYRLFRKSNLKPFERDISTEIYQAGSTPCNGVEGFNCYFPLQSYGFQPTNGVGYQPYRVVVLSFELLHAPATVCGPKKSTGGSGGSGSGGSGGSGSEKAAKAEEAARKMEELFKKHKIVAVLRANSVEEAIEKAVAVFAGGVHLIEITFTVPDADTVIKALSVLKEKGAIIGAGTVTSVEQARKAVESGAEFIVSPHLDEEISQFAKEKGVFYMPGVMTPTELVKAMKLGHTILKLFPGEVVGPQFVKAMKGPFPNVKFVPTGGVNLDNVAEWFKAGVLAVGVGSALVKGTPDEVREKAKAFVEKIRGATE

SEQ ID NO: 201 - protein, 435 aa, Artificial Sequence
  Synthetic Peptide - RBD-compA fusion construct
RFPNITNLCPFGEVFNATRFASVYAWNRKRISNCVADYSVLYNSASFSTFKCYGVSPTKLNDLCFTNVYADSFVIRGDEVRQIAPGQTGNIADYNYKLPDDFTGCVIAWNSNNLDSKVGGNYNYLYRLFRKSNLKPFERDISTEIYQAGSTPCNGVKGFNCYFPLQSYGFQPTYGVGYQPYRVVVLSFELLHAPATVCGPKKSTGGSGGSGSGGSGGSGSEKAAKAEEAARKMEELFKKHKIVAVLRANSVEEAIEKAVAVFAGGVHLIEITFTVPDADTVIKALSVLKEKGAIIGAGTVTSVEQARKAVESGAEFIVSPHLDEEISQFAKEKGVFYMPGVMTPTELVKAMKLGHTILKLFPGEVVGPQFVKAMKGPFPNVKFVPTGGVNLDNVAEWFKAGVLAVGVGSALVKGTPDEVREKAKAFVEKIRGATE

SEQ ID NO: 202 - protein, 435 aa, Artificial Sequence
  Synthetic Peptide - RBD-compA fusion construct
RFPNITNLCPFGEVFNATRFASVYAWNRKRISNCVADFSVLYNSASFSTFKCYGVSPTKLNDLCWTNIYADSFVIRGDEVRQIAPGQTGKIADYNYKLPDDFTGCVIAWNSNNLDSKVGGNYNYLYRLFRKSNLKPFERDISTEIYQAGSTPCNGVEGFNCYFPLQSYGFQPTYGVGYQPYRVVVLSFELLHAPATVCGPKKSTGGSGGSGSGGSGGSGSEKAAKAEEAARKMEELFKKHKIVAVLRANSVEEAIEKAVAVFAGGVHLIEITFTVPDADTVIKALSVLKEKGAIIGAGTVTSVEQARKAVESGAEFIVSPHLDEEISQFAKEKGVFYMPGVMTPTELVKAMKLGHTILKLFPGEVVGPQFVKAMKGPFPNVKFVPTGGVNLDNVAEWFKAGVLAVGVGSALVKGTPDEVREKAKAFVEKIRGATE

SEQ ID NO: 203 - protein, 435 aa, Artificial Sequence
  Synthetic Peptide - RBD-compA fusion construct
RFPNITNLCPFGEVFNATRFASVYAWNRKRISNCVADFSVLYNSASFSTFKCYGVSPTKLNDLCWTNIYADSFVIRGDEVRQIAPGQTGNIADYNYKLPDDFTGCVIAWNSNNLDSKVGGNYNYLYRLFRKSNLKPFERDISTEIYQAGSTPCNGVKGFNCYFPLQSYGFQPTYGVGYQPYRVVVLSFELLHAPATVCGPKKSTGGSGGSGSGGSGGSGSEKAAKAEEAARKMEELFKKHKIVAVLRANSVEEAIEKAVAVFAGGVHLIEITFTVPDADTVIKALSVLKEKGAIIGAGTVTSVEQARKAVESGAEFIVSPHLDEEISQFAKEKGVFYMPGVMTPTELVKAMKLGHTILKLFPGEVVGPQFVKAMKGPFPNVKFVPTGGVNLDNVAEWFKAGVLAVGVGSALVKGTPDEVREKAKAFVEKIRGATE

SEQ ID NO: 204 - protein, 435 aa, Artificial Sequence
  Synthetic Peptide - RBD-compA fusion construct
RFPNITNLCPFGEVFNATRFASVYAWNRKRISNCVADFSVLYNSASFSTFKCYGVSPTKLNDLCWTNIYADSFVIRGDEVRQIAPGQTGKIADYNYKLPDDFTGCVIAWNSNNLDSKVGGNYNYLYRLFRKSNLKPFERDISTEIYQAGSTPCNGVEGFNCYFPLQSYGFQPTNGVGYQPYRVVVLSFELLHAPATVCGPKKSTGGSGGSGSGGSGGSGSEKAAKAEEAARKMEELFKKHKIVAVLRANSVEEAIEKAVAVFAGGVHLIEITFTVPDADTVIKALSVLKEKGAIIGAGTVTSVEQARKAVESGAEFIVSPHLDEEISQFAKEKGVFYMPGVMTPTELVKAMKLGHTILKLFPGEVVGPQFVKAMKGPFPNVKFVPTGGVNLDNVAEWFKAGVLAVGVGSALVKGTPDEVREKAKAFVEKIRGATE

SEQ ID NO: 205 - protein, 435 aa, Artificial Sequence; identical to SEQ ID NO: 203
  Synthetic Peptide - RBD-compA fusion construct

SEQ ID NO: 206 - protein, 204 aa, Severe acute respiratory syndrome coronavirus 2
RFPNITNLCPFGEVFNATRFASVYAWNRKRISNCVADYSVLYNSASFSTFKCYGVSPTKLNDLCFTNVYADSFVIRGDEVRQIAPGQTGKIADYNYKLPDDFTGCVIAWNSNNLDSKVGGNYNYLYRLFRKSNLKPFERDISTEIYQAGSTPCNGVEGFNCYFPLQSYGFQPTNGVGYQPYRVVVLSFELLHAPATVCGPKKST

SEQ ID NO: 207 - protein, 204 aa, Severe acute respiratory syndrome coronavirus 2
RFPNITNLCPFGEVFNATRFASVYAWNRKRISNCVADYSVLYNSASFSTFKCYGVSPTKLNDLCFTNVYADSFVIRGDEVRQIAPGQTGNIADYNYKLPDDFTGCVIAWNSNNLDSKVGGNYNYLYRLFRKSNLKPFERDISTEIYQAGSTPCNGVKGFNCYFPLQSYGFQPTYGVGYQPYRVVVLSFELLHAPATVCGPKKST

SEQ ID NO: 208 - protein, 204 aa, Severe acute respiratory syndrome coronavirus 2
RFPNITNLCPFGEVFNATRFASVYAWNRKRISNCVADFSVLYNSASFSTFKCYGVSPTKLNDLCWTNIYADSFVIRGDEVRQIAPGQTGKIADYNYKLPDDFTGCVIAWNSNNLDSKVGGNYNYLYRLFRKSNLKPFERDISTEIYQAGSTPCNGVEGFNCYFPLQSYGFQPTYGVGYQPYRVVVLSFELLHAPATVCGPKKST

SEQ ID NO: 209 - protein, 204 aa, Severe acute respiratory syndrome coronavirus 2
RFPNITNLCPFGEVFNATRFASVYAWNRKRISNCVADFSVLYNSASFSTFKCYGVSPTKLNDLCWTNIYADSFVIRGDEVRQIAPGQTGNIADYNYKLPDDFTGCVIAWNSNNLDSKVGGNYNYLYRLFRKSNLKPFERDISTEIYQAGSTPCNGVKGFNCYFPLQSYGFQPTYGVGYQPYRVVVLSFELLHAPATVCGPKKST

SEQ ID NO: 210 - protein, 28 aa, Severe acute respiratory syndrome coronavirus 2
MGILPSPGMPALLSLVSLLSVLLMGCVA

SEQ ID NO: 211 - protein, 32 aa, Severe acute respiratory syndrome coronavirus 2
MGILPSPGMPALLSLVSLLSVLLMGCVAETGT

SEQ ID NO: 212 - protein, 25 aa, Respiratory syncytial virus
MELLILKANAITTILTAVTFCFASG

SEQ ID NO: 213 - protein, 15 aa, Artificial Sequence
  Synthetic peptide linker sequence
GSGGSGSGSGGSGSG

SEQ ID NO: 214 - protein, 8 aa, Artificial Sequence
  Synthetic peptide linker sequence
GGSGGSGS

SEQ ID NO: 215 - protein, 8 aa, Artificial Sequence
  Synthetic peptide linker sequence
GSGGSGSG

SEQ ID NO: 216 - protein, 27 aa, Escherichia virus T4
GYIPEAPRDGQAYVRKDGEWVLLSTFL
